(19) United States
(12) Patent Application Publication
(10) Pub. No.: US 2024/0392004 A1
(43) Pub. Date: Nov. 28, 2024

(54) IMMUNOMODULATORY MOLECULES AND USES THEREOF

(71) Applicant: Immunowake Inc., Birmingham, AL (US)

(72) Inventors: Ellen WU, Birmingham, AL (US); Xiaoyun WU, Birmingham, AL (US); John WAKEFIELD, Birmingham, AL (US)

(21) Appl. No.: 18/281,216

(22) PCT Filed: Mar. 10, 2022
(86) PCT No.: PCT/US2022/071077

§ 371 Date: Sep. 8, 2023

(51) Int. Cl. C07K 16/28; A61K 39/00; A61P 35/00; C07K 14/54; C07K 14/55; C07K 14/56; C07K 14/57

(52) U.S. Cl. CPC C07K 16/2818; A61P 35/00; C07K 14/54; C07K 14/5428; C07K 14/5434; C07K 14/55; C07K 14/56; C07K 14/57; C07K 16/2827; A61K 2039/505; C07K 2317/53; C07K 2317/55; C07K 2317/76

(57) ABSTRACT

The present application relates to immunomodulatory molecules comprising a first binding domain (e.g., immunostimulatory cytokine such as IL-2 or IL-12 or variant thereof) specifically recognizing a first target molecule (e.g., receptor of immunostimulatory cytokine) and a second binding domain (e.g., agonist ligand such as PD-L1 or PD-L2 or variant thereof, or agonist antigen-binding fragment such as anti-PD-1 agonist Fab, scFv, VHH, or full-length antibody) specifically recognizing a second target molecule (e.g., inhibitory checkpoint molecule such as PD-1), wherein the first binding domain upon binding to the first target molecule up-regulates an immune response, and wherein the second, binding domain upon binding to the second target molecule down-regulates the immune response. Methods of making and uses of such immunomodulatory molecules are also provided.

### CROSS REFERENCE TO RELATED APPLICATIONS

[0001] This application claims priority benefits of U.S. Provisional Patent Application No. 63/159,441 filed Mar. 10, 2021, and International Patent Application No. PCT/US2021/073107 filed Dec. 23, 2021, the contents of each of which are incorporated herein by reference in their entirety.

### SUBMISSION OF SEQUENCE LISTING ON ASCII TEXT FILE

[0002] The content of the following submission on ASCII text file is incorporated herein by reference in its entirety: a computer readable form (CRF) of the Sequence Listing (file name: 754392000740SEQLIST.TXT, date recorded: Mar. 10, 2022, size: 789,099 bytes).

### FIELD OF THE INVENTION

[0003] The present invention relates to immunomodulatory molecules that both up-regulate an immune response and down-regulate the immune response, methods of making, and uses thereof.

### BACKGROUND OF THE INVENTION

[0004] Current immunotherapy often triggers too much undesired immune response such as immune cell over-activation, cytokine storm, etc.

[0005] Cytokines are key regulators of the innate and adaptive immune system that enable immune cells to communicate with each other. Cytokine therapy for activating the immune system of cancer patients continue to be a key area of interest for clinical cancer research. A significant challenge for cytokine monotherapy is to achieve effective anti-tumor responses without causing treatment-limiting toxicities. This dilemma is well exemplified by the low response rates and notorious toxicities of IL-2 and IL-12 therapy. High doses of IL-2 are found to induce vascular leak syndrome (VLS), tumor tolerance caused by activation-induced cell death (AICD), and immunosuppression caused by the activation of regulatory T cells (Tregs). These severe side effects often restrict optimal IL-2 dosing, which limits the number of patients who successfully respond to the therapy. IL-12 has demonstrated modest anti-tumor responses in clinical trials, but often accompanied by significant issues with toxicity (Lasek et al., Cancer Immunol Immunother., 2014). IL-12 treatment was found to associate with systemic flu-like symptoms (e.g., fever, chills, fatigue, erythromelalgia, and headache) and toxic effects on bone marrow and liver. Dosing studies showed that patients could only tolerate IL-12 under 1 μg/kg, far below therapeutically effective dose. Either used as monotherapy or in combination with other agents, IL-12 failed to demonstrate potent sustained therapeutic efficacy in clinical trials (Lasek et al., 2014).

[0006] Several approaches have been taken to overcome issues with cytokine monotherapy. Recently, NKTR-214, a recombinant human IL-2 conjugated with polyethylene glycol (PEG; “IL-2-PEG”), has shown promising results in animal models. IL-2-PEG offers two benefits. First, steric hindrance of PEG masks the region on IL-2 that interacts with IL-2 receptor a (IL-2Rα) subunit responsible for activating immunosuppressive Tregs, biasing activity towards tumor killing CD8+ T cells (Charych et al., Clin Cancer Res., 2016). Second, the conjugation of PEG greatly improves plasma half-life and inproteolytic-stability and decreases immunogenicity and hepatic uptake (Chaffee et al., J Clin Invest., 1992; Pyatak et al., Res Commun Chem Pathol Pharmacol., 1980). Targeted delivery of cytokines (e.g., IL-12) to tumor sites by localized injection or by use of immunocytokines (cytokines fused to antibodies, antibody fragments, or ligand/receptor-Fc fusion protein) have also been developed to overcome side effects of cytokine therapy. Immunocytokines can target cytokines to cells or tissues of interest, such as tumor cells or immune effector cells (Klein et al., Oncoimmunology, 2017; King et al., J Clin Oncol., 2004).

[0007] The disclosures of all publications, patents, patent applications and published patent applications referred to herein are hereby incorporated herein by reference in their entirety.

### BRIEF SUMMARY OF THE INVENTION

[0008] One aspect of the present application provides an immunomodulatory molecule comprising a first binding domain (e.g., immunostimulatory cytokine such as IL-2 or IL-12 or variant thereof) specifically recognizing a first target molecule (e.g., receptor of immunostimulatory cytokine) and a second binding domain (e.g., agonist ligand such as PD-L1 or PD-L2 or variant thereof, or agonist antigen-binding fragment such as anti-PD-1 agonist Fab, scFv, VHH, or full-length antibody) specifically recognizing a second target molecule (e.g., inhibitory checkpoint molecule such as PD-1), wherein the first binding domain upon binding to the first target molecule (e.g., IL-2 or IL-12 receptor) up-regulates an immune response, and wherein the second binding domain upon binding to the second target molecule (e.g., PD-1) down-regulates the immune response

[0009] Another aspect of the present application provides a method of modulating an immune response in an individual, comprising administering to the individual an effective amount of any of the immunomodulatory molecules described herein.

[0010] Further provided are isolated nucleic acids encoding any one of the immunomodulatory molecules described herein, vectors (e.g., lentiviral vector) comprising such nucleic acids, host cells (e.g., CHO cell) comprising such nucleic acids or vectors, and methods of producing any one of the immunomodulatory molecules described herein.

[0011] Also provided are compositions (e.g., pharmaceutical compositions), kits, and articles of manufacture comprising any of the immunomodulatory molecules described herein. Methods of treating a disease or disorder (e.g., cancer, infection, autoimmune disease, allergy, graft rejection, or graft-versus-host disease (GvHD)) in an individual using an effective amount of any of the immunomodulatory molecules or compositions (e.g., pharmaceutical compositions) described herein are also provided.

### BRIEF DESCRIPTION OF THE DRAWINGS

[0012] FIGS. 1A-1W depict exemplary immunomodulatory molecule structures of the present invention. FIG. 1A depicts an exemplary immunomodulatory structure comprising a cytokine or variant thereof fused to the N-terminus of a subunit of the Fc fragment of a parental full-length antibody. FIG. 1B depicts a dimeric (homodimeric or heterodimeric) cytokine or variant thereof (e.g., IFN-γ, IL-10, IL-12, or IL-23) expressed in a single chain and positioned at the hinge region of one heavy chain of a parental full-length antibody. FIGS. 1A-1B depict exemplary immunomodulatory structures of the present invention immunostimulatory, in which an immunostimulatory cytokine or variant thereof (e.g., IFN-γ, IL-2, IL-12, or IL-23) expressed in a single chain and positioned at the hinge region of one heavy chain of a dimeric parental ligand/receptor/Fab-hinge-Fc fusion protein. FIG. 1A shows that the Fab of the dimeric parental ligand/receptor/Fab-hinge-Fc fusion protein can be an agonist. FIG. 1B shows that the Fab of the dimeric parental ligand/receptor/Fab-hinge-Fc fusion protein can be an agonist or non-agonist. FIG. 1C depicts an exemplary immunomodulatory structures of the present invention immunostimulatory, in which an immunostimulatory cytokine or variant thereof (e.g., IFN-γ, IL-2, IL-12, or IL-23) expressed in a single chain and positioned at the hinge region of one heavy chain of a parental full-length, agonist antibody (e.g., anti-PD-1 agonist). FIG. 1D depict alternative exemplary immunomodulatory structures of the present invention, in which an immunostimulatory cytokine or variant thereof is positioned between a VH (e.g., within a Fab of an agonist antibody) and a subunit of an Fc fragment. FIG. 1E depicts an exemplary immunomodulatory structure comprising an immunostimulatory cytokine or variant thereof (e.g., IFN-γ, IL-2, IL-12, or IL-23) positioned at the hinge region of one polypeptide of a dimeric parental ligand/receptor-hinge-Fc fusion protein. FIG. 1F depicts an exemplary immunomodulatory structure comprising an immunostimulatory cytokine or variant thereof (e.g., IFN-γ, IL-2, IL-12, or IL-23) fused to the N-terminus of a subunit of the Fc fragment of a parental full-length agonist antibody (e.g., anti-PD agonist). FIG. 1G depicts an exemplary immunomodulatory structure comprising of cytokine or variant thereof (e.g., IFN-γ, IL-2, IL-12, or TL-23) positioned at the hinge region of one polypeptide of a parental ligand/receptor-hinge-Fc fusion protein. FIG. 1H depicts an exemplary immunomodulatory structure comprising of immunostimulatory cytokine or variant thereof (e.g., IFN-γ, IL-2, IL-12, or IL-23) positioned at the hinge region of one polypeptide of a dimeric parental ligand/receptor-hinge-Fc fusion protein. FIG. 1I depicts an exemplary immunomodulatory structures of the present invention immunostimulatory, in which an immunostimulatory cytokine or variant thereof (e.g., IFN-γ, IL-2, IL-12, or IL-23) positioned at the C-terminus of the Fc domain of a parental ligand/receptor-hinge-Fc fusion protein. FIG. 1J depicts an exemplary immunomodulatory structure comprising of an immunostimulatory cytokine or variant thereof (e.g., IFN-γ, IL-2, IL-12, or IL-23) positioned at the C-terminus of the Fc domain of a parental full-length, agonist antibody (e.g., anti-PD-1 agonist). FIG. 1K depicts an exemplary immunomodulatory structure comprising of an immunostimulatory cytokine or variant thereof (e.g., IFN-γ, IL-2, IL-12, or IL-23) positioned at the C-terminus of the Fc domain of a dimeric parental ligand/receptor/agonist Fab-hinge-Fc fusion protein. FIG. 1L depicts two cytokines or variants thereof each positioned at the hinge region of one polypeptide of a parental ligand/receptor-hinge-Fc fusion protein, or a dimeric (homodimeric or heterodimeric) cytokine or variant thereof with each subunit positioned at the hinge region of one polypeptide of a parental ligand/receptor-hinge-Fc fusion protein. FIG. 1M depicts two cytokines or variants thereof each positioned at the hinge region of one polypeptide of a parental ligand/receptor-hinge-Fc fusion protein, or a dimeric (homodimeric or heterodimeric) cytokine or variant thereof with each subunit positioned at the hinge region of one polypeptide of a dimeric parental ligand/receptor-hinge-Fc fusion protein. FIGS. 1N-10 depicts two cytokines or variants thereof each positioned at the hinge region of one polypeptide of a parental full-length, agonist antibody, or a dimeric (homodimeric or heterodimeric) cytokine or variant thereof with each subunit positioned at the hinge region of one polypeptide of a parental full-length, agonist antibody. FIG. 1N shows that the Fab is the same, wherein they are both from an agonist antibody. FIG. 1O shows that the Fab can be different, wherein one is the Fab of an agonist antibody and the other is a different Fab (can be non-agonist or agonist). FIG. 1P depicts two cytokines or variants thereof each positioned at the C-terminus of the Fc domain of a parental ligand/receptor-hinge-Fc fusion protein, or a dimeric (homodimeric or heterodimeric) cytokine or variant thereof with each subunit positioned at the C-terminus of one polypeptide of a parental ligand/receptor-hinge-Fc fusion protein and another at the hinge region of one polypeptide of a parental ligand/receptor-hinge-Fc fusion protein. FIGS. 1Q-1R depicts two cytokines or variants thereof each positioned at the C-terminus of one polypeptide of a parental full-length, antibody, or a dimeric (homodimeric or heterodimeric) cytokine or variant thereof with each subunit positioned at the C-terminus of one polypeptide of Fc domain of agonist antibody and another at the C-terminus of one polypeptide of the Fc domain. FIG. 1Q shows that the Fabs can be the same, wherein they are both from an agonist antibody. FIG. 1R shows that the Fab can be different, wherein one is the Fab of an agonist antibody and the other is a different Fab (can be non-agonist or agonist). FIG. 1S depicts an exemplary immunomodulatory structure comprising an immunostimulatory cytokine or variant thereof fused to the C-terminus of a light chain constant region (CL) of a parental full-length agonist antibody. FIG. 1T depicts an exemplary immunomodulatory structure comprising an immunostimulatory cytokine or variant thereof fused to the N-terminus of a heavy chain variable domain (VH) of a parental full-length antibody. FIG. 1U depicts an exemplary immunomodulatory structure comprising an immunostimulatory cytokine or variant thereof fused to the N-terminus of one polypeptide of a dimeric parental ligand/receptor-hinge-Fc fusion protein. FIG. 1V depicts an exemplary immunomodulatory structure comprising an immunostimulatory cytokine or variant thereof fused to the N-terminus of one polypeptide of a parental ligand/receptor/agonist Fab-hinge-Fc fusion protein. FIG. 1W depicts an exemplary immunomodulatory structure comprising an immunostimulatory cytokine or variant thereof fused to the N-terminus of a heavy chain variable domain (VH) of a parental ligand/receptor/agonist Fab-hinge-Fc fusion protein.

[0013] FIGS. 2A-2C depict tumor volume in CT26 syngeneic tumor mice treated with IL-12(F60A)/PD-L2-Fc, hinge (IW-#30) immunomodulatory molecule, IL-12(F60A)/PD-L2-Fc, C-terminus of HC (IW-#34) immunomodulatory molecule, or PBS (negative control). Black arrows indicate injection days. The individual mice responses in each group are given in FIGS. 2B-2C.

[0014] FIGS. 3A-3B depict CT26 and EMT6 tumor volume growth overtime in cured CT26 mice (previously cured in FIGS. 2A-2C).

[0015] FIG. 4A depicts tumor volume in CT26 syngeneic tumor mice treated with IL-12(E59A/F60A)/PD-L2-Fc, hinge (IW-#29) immunomodulatory molecule, IL-12(F60A)/PD-L2-Fc, hinge (IW-#30) immunomodulatory molecule, or PBS (negative control). Black arrows indicate injection days. FIG. 4B depicts a series of pictures taken of one mouse over the course of treatment with L-12(F60A)/PD-L2-Fc, hinge (IW-#30) immunomodulatory molecule.

[0016] FIGS. 5A-5D depict tumor volume in EMT6 syngeneic tumor mice treated with IL-12(E59A/F60A)/PD-L2-Fc, hinge (IW-#29) immunomodulatory molecule, IL-12(F60A)/PD-L2-Fc, hinge (IW-#30) immunomodulatory molecule, IL-12(E59A/F60A)/anti-PD-1, hinge (IW-#48) immunomodulatory molecule, or PBS (negative control). Black arrows indicate injection days. The individual mice responses in each group are given in FIGS. 5B-5D.

[0017] FIGS. 6A-6C depict CT26 and EMT6 tumor volume growth overtime in cured EMT6 mice (previously cured in FIGS. 5A-5D).

[0018] FIGS. 7A-7D depict tumor volume in 4T1 syngeneic tumor mice treated with increasing concentrations (0, 1, 3, 10, and 50 mg/kg) of IL-12(F60A)/PD-L2-Fc, hinge (IW-#30) immunomodulatory molecule, IL-12(F60A)/PD-L2-Fc, C-terminus of HC (IW-#34) immunomodulatory molecule, IL-12(F60A)/anti-PD-1, hinge (IW-#46) immunomodulatory molecule, IL-12(E59A/F60A)/anti-PD-1, hinge (IW-#48) immunomodulatory molecule, or PBS (negative control). Black arrows indicate injection days.

[0019] FIGS. 8A-8C depict tumor volume in B16-F10 syngeneic tumor mice treated with IL-12(F60A)/PD-L2-Fc, hinge (IW-#30) immunomodulatory molecule, PD-L2-Fc/IL-12(F60A) (IW-#34; C-terminal fusion) immunomodulatory molecule, or PBS (negative control). Black arrows indicate injection days. FIG. 8A shows the average tumor volume of all mouse groups, with the average tumor size (±STD) when the first treatment was administered shown in parenthesis. FIGS. 8B-8C show tumor volumes for individual mouse receiving the indicated IL-12 immunomodulatory molecules.

[0020] FIGS. 9A-9C depict tumor volume in LL2 syngeneic tumor mice treated with IL-12(F60A)/PD-L2-Fc, hinge (IW-#30) immunomodulatory molecule, IL-12(F60A)/PD-L2-Fc, C-terminus of HC (IW-#34) immunomodulatory molecule, or PBS (negative control). Black arrows indicate injection days. The individual mice responses in each group are given in FIGS. 9B-9C.

[0021] FIG. 10 shows two approaches for activating the immune system against a disease (e.g., cancer). The left panel shows a target-independent activation mechanism (“trans-activation”), wherein an immunomodulatory molecule can bind to a target antigen on an immune cell (e.g., a T cell), and can bind to a target antigen on a target cell (e.g., tumor cell), thereby bringing the immune cell into proximity with the target cell for therapeutic effect. This approach, however, can be associated with systemic toxicities, as the binding domain (e.g., wildtype immunostimulatory cytokine, such as IL-12 or IL-2) targeting immune cells can stimulate immune response even in the absence of target cells. The right panel shows target cell-antigen (e.g., tumor antigen) independent activation mechanism (“cis-activation”), in which the immunomodulatory molecules can both up-regulate and down-regulate immune responses, which more closely mimics the natural regulation and balance of the immune system. In a further aspect, immunomodulatory molecules in both left and right panels can further have a “restricted activation mechanism”, in which the first binding domain upon binding to an immune cell upregulating an immune response (e.g., immunostimulatory cytokine, such as IL-12 or IL-2) is modified to reduce activity (binding and/or biological activity), and/or in a “masked” configuration (e.g., positioned at hinge region) until binding of the second binding domain to the second target antigen (e.g., tumor antigen, or immune cell surface molecule) occurs. Exemplary immunomodulatory molecules of the present invention can function via restricted activation, cis-activation, trans-activation, or all mechanisms.

[0022] FIGS. 11A-11L depict exemplary multispecific immunomodulatory molecules of the present invention. The immunomodulatory molecules may comprise a variety of combinations of binding domain types. i) a first binding domain, labeled as “1” in the figures, which upon binding to a first target molecule up-regulates an immune response; ii) a second binding domain, labeled as “2” in the figures, which upon binding to a second target molecule down-regulates the immune response; and iii) optionally, a third binding domain, labeled as “3” in the figures, which helps localize the immunomodulatory molecule to a target site (e.g., the tumor microenvironment) by targeting a third target molecule (e.g., marker of exhausted T-cells, T cell surface marker, or tumor antigens). The immunomodulatory molecules can comprise one or more of any of first, second, and/or third binding domain. The multiple first binding domains can be the same or different from each other. The multiple second binding domains can be the same or different from each other. The multiple third binding domains can be the same or different from each other. The various binding domains within the immunomodulatory molecules can be constructed in various configurations, not limited to those shown in FIGS. 11A-11L. As exemplified in FIGS. 11A-11L, the IL-12 moiety (such as a mutant IL-12 moiety with reduced IL-12 activity; either constructed as a single chain fusion, or as two separate subunits) positioned at the C′ of one or both Fc subunits can be a type of first binding domain which upon binding to IL-12R on immune cells up-regulates an immune response. Hence, in FIGS. 11G, 11I, and 11J, the IL-12 moiety functions as “the first binding domain”. The first binding domain (e.g., immunostimulatory cytokine moiety or variant thereof) can be placed at the hinge region between an Fc subunit and the second binding domain or the third binding domain, such as exemplary configurations shown in FIGS. 11A-11F, 11H, 11K, and 11L. Such “restricted access” configurations for first binding domain to its first target molecule can allow i) reduced, minimal or no binding/activity between the first binding domain to its first target molecule in the absence of the binding between the second binding domain to the second target molecule and/or the binding between the third binding domain to the third target molecule (whichever domain that is at N′ of the first binding domain); and ii) rescued/recovered binding/activity of the first binding domain in the presence of the binding between the second binding domain to the second target molecule and/or the binding between the third binding domain to the third target molecule (whichever domain that is at N′ of the first binding domain). The first binding domain (e.g., immunostimulatory cytokine moiety or variant thereof) can also be placed at C′ of one or both Fc subunits of an Fc-fusion protein, such as the IL-12 moiety (either constructed as a single chain fusion and fused to one Fc subunit, or as two separate subunits each fused to one Fc subunit of an Fc domain) exemplified in FIGS. 11A-11L. Such configurations do not or barely restrict binding/activity of the first binding domain.

[0023] FIGS. 12A-12D depict exemplary immunomodulatory molecules with a first binding domain (e.g., immunostimulatory cytokines such as IL-12 or variant thereof, for example constructed as a single chain fusion) positioned at the hinge region of one polypeptide chain of a parental (ligand/receptor/antigen binding domain)-hinge-Fc fusion protein, which can be homodimeric or heterodimeric. FIG. 12A depicts an exemplary immunomodulatory molecule, wherein PD-L1 or PD-L2 extracellular domain (wildtype or mutant) is fused to N-terminus of an Fc domain via hinge, and an immunostimulatory cytokine moiety (e.g., IL-12 or variant constructed as a single chain fusion) is positioned at the hinge region of one of the (PD-L1 or PD-L2)-hinge-Fc polypeptide chains. Can be referred to as IL-12/PD-L1-Fc or IL-12/PD-L2-Fc. FIG. 12B depicts an exemplary immunomodulatory molecule wherein PD-L1 or PD-L2 extracellular domain (wildtype or mutant) is fused to the N-terminus of a first Fc subunit via a first hinge, a CD155 extracellular domain (wildtype or mutant) is fused to the N-terminus of a second Fc subunit via a second hinge, and an immunostimulatory cytokine moiety (e.g., IL-12 or variant constructed as a single chain fusion) is positioned at the hinge region of one of the pairing polypeptide chains (such as the PD-L1/PD-L2-hinge-Fc chain). Can be referred to as IL-12/PD-L1-Fc/CD155-Fc or IL-12/PD-L2-Fc/CD155-Fc. FIG. 12C depicts an exemplary immunomodulatory molecule, wherein PD-L1 or PD-L2 extracellular domain (wildtype or mutant) is fused to the N-terminus of a first Fc subunit via a first hinge, an antibody moiety (e.g., sdAb or scFv) specifically recognizing a target molecule (can be agonist, antagonist, or neutral Ab, regulating or not-regulating immune response) is fused to the N-terminus of a second Fc subunit via a second hinge, and an immunostimulatory cytokine moiety (e.g., IL-12 or variant constructed as a single chain fusion) is positioned at the hinge region of one of the pairing polypeptide chains (such as the PD-L1/PD-L2-hinge-Fc chain). Can be referred to as sdAb/IL-12/PD-L1-Fc or sdAb/IL-12/PD-L2-Fc. FIG. 12D depicts an exemplary immunomodulatory molecule, wherein PD-L1 or PD-L2 extracellular domain (wildtype or mutant) is fused to the N-terminus of a first Fc subunit via a first hinge, a Fab specifically recognizing a target molecule (can be agonist, antagonist, or neutral Ab, regulating or not-regulating immune response) is fused through its CH1 to the N-terminus of a second Fc subunit via a second hinge, and an immunostimulatory cytokine moiety (e.g., IL-12 or variant constructed as a single chain fusion) is positioned at the hinge region of one of the pairing polypeptide chains (such as the PD-L1/PD-L2-hinge-Fc chain). Can be referred to as Fab/IL-12/PD-L1-Fc or Fab/IL-12/PD-L2-Fc.

[0024] FIGS. 13A-13D depict exemplary immunomodulatory molecules with a first binding domain (e.g., immunostimulatory cytokines such as IL-12 or variant thereof, for example constructed as a single chain fusion) positioned at the C-terminus of the Fc domain (one or both Fc subunits) of a parental (ligand/receptor/antigen binding domain)-hinge-Fc fusion protein, which can be homodimeric or heterodimeric. FIG. 13A depicts an exemplary immunomodulatory molecule wherein PD-L1 or PD-L2 extracellular domain (wildtype or mutant) is fused to N-terminus of an Fc domain via an optional hinge, and an immunostimulatory cytokine moiety (e.g., IL-12 or variant constructed as a single chain fusion) is positioned at the C-terminus one or both subunits of the Fc domain. Can be referred to as PD-L1-Fc/IL-12 or PD-L2-Fc/IL-12. FIG. 13B depicts an exemplary immunomodulatory molecule wherein PD-L1 or PD-L2 extracellular domain (wildtype or mutant) is fused to the N-terminus of a first Fc subunit via a first optional hinge, a CD155 extracellular domain (wildtype or mutant) is fused to the N-terminus of a second Fc subunit via a second optional hinge, and an immunostimulatory cytokine moiety (e.g., IL-12 or variant constructed as a single chain fusion) is positioned at the C-terminus one or both subunits of the Fc domain (such as C′ of the PD-L1/PD-L2-hinge-Fc chain). Can be referred to as PD-L1-Fc/CD155-Fc/IL-12 or PD-L2-Fc/CD155-Fc/IL-12. FIG. 13C depicts an exemplary immunomodulatory molecule, wherein PD-L1 or PD-L2 extracellular domain (wildtype or mutant) is fused to the N-terminus of a first Fc subunit via a first optional hinge, an antibody moiety (e.g., sdAb or scFv) specifically recognizing a target molecule (can be agonist, antagonist, or neutral Ab, regulating or not-regulating immune response) is fused to the N-terminus of a second Fc subunit via a second optional hinge, and an immunostimulatory cytokine moiety (e.g., IL-12 or variant constructed as a single chain fusion) is positioned at the C-terminus one or both subunits of the Fc domain (such as C′ of the PD-L1/PD-L2-hinge-Fc chain). Can be referred to as sdAb/PD-L1-Fc/IL-12 or sdAb/PD-L2-Fc/IL-12. FIG. 13D depicts an exemplary multi-target immunomodulatory molecule wherein PD-L1 or PD-L2 extracellular domain (wildtype or mutant) is fused to the N-terminus of a first Fc subunit via a first optional hinge, a Fab specifically recognizing a target molecule (can be agonist, antagonist, or neutral Ab, regulating or not-regulating immune response) is fused through its CH1 to the N-terminus of a second Fc subunit via a second optional hinge, and an immunostimulatory cytokine moiety (e.g., IL-12 or variant constructed as a single chain fusion) is positioned at the C-terminus one or both subunits of the Fc domain (such as C′ of the PD-L1/PD-L2-hinge-Fc chain). Can be referred to as Fab/PD-L1-Fc/IL-12 or Fab/PD-L2-Fc/IL-12.

[0025] FIGS. 14A-14D depict exemplary immunomodulatory molecules with two first binding domains (e.g., immunostimulatory cytokines such as IL-12, IL-2 or variant thereof, for example constructed as a single chain fusion) each positioned at the hinge region of one polypeptide chain of a parental (ligand/receptor/antigen binding domain)-hinge-Fc fusion protein, which can be homodimeric or heterodimeric. FIG. 14A depicts an exemplary immunomodulatory molecule, wherein PD-L1 or PD-L2 extracellular domain (wildtype or mutant) is fused to N-terminus of an Fc domain via hinge, a first immunostimulatory cytokine moiety (e.g., IL-12 or variant constructed as a single chain fusion) is positioned at the hinge region of one of the (PD-L1 or PD-L2)-hinge-Fc polypeptide chains, and a second immunostimulatory cytokine moiety (e.g., IL-2 or variant thereof) is positioned at the hinge region of the other chain of the (PD-L1 or PD-L2)-hinge-Fc polypeptide chains. Can be referred to as IL-12/IL-2/PD-L1-Fc or IL-12/IL-2/PD-L2-Fc. FIG. 14B depicts an exemplary immunomodulatory molecule, wherein PD-L1 or PD-L2 extracellular domain (wildtype or mutant) is fused to the N-terminus of a first Fc subunit via a first hinge, a CD155 extracellular domain (wildtype or mutant) is fused to the N-terminus of a second Fc subunit via a second hinge, a first immunostimulatory cytokine moiety (e.g., IL-12 or variant constructed as a single chain fusion) is positioned at the hinge region of one of the pairing polypeptide chains (such as the PD-L1/PD-L2-hinge-Fc chain), and a second immunostimulatory cytokine moiety (e.g., IL-2 or variant thereof) is positioned at the hinge region of the other chain of the pairing polypeptide chains (such as the CD155-hinge-Fc chain). Can be referred to as IL-12/IL-2/PD-L1-Fc/CD155-Fc or IL-12/IL-2/PD-L2-Fc/CD155-Fc. FIG. 14C depicts an exemplary immunomodulatory molecule, wherein PD-L1 or PD-L2 extracellular domain (wildtype or mutant) is fused to the N-terminus of a first Fc subunit via a first hinge, an antibody moiety (e.g., sdAb or scFv) specifically recognizing a target molecule (can be agonist, antagonist, or neutral Ab, regulating or not-regulating immune response) is fused to the N-terminus of a second Fc subunit via a second hinge, a first immunostimulatory cytokine moiety (e.g., IL-12 or variant constructed as a single chain fusion) is positioned at the hinge region of one of the pairing polypeptide chains (such as the PD-L1/PD-L2-hinge-Fc chain), and a second immunostimulatory cytokine moiety (e.g., IL-2 or variant thereof) is positioned at the hinge region of the other chain of the pairing polypeptide chains (such as the CD155-hinge-Fc chain). Can be referred to as sdAb/IL-12/IL-2/PD-L1-Fc or sdAb/IL-12/IL-2PD-L2-Fc. FIG. 14D depicts an exemplary immunomodulatory molecule, wherein PD-L1 or PD-L2 extracellular domain (wildtype or mutant) is fused to the N-terminus of a first Fc subunit via a first hinge, a Fab specifically recognizing a target molecule (can be agonist, antagonist, or neutral Ab, regulating or not-regulating immune response) is fused through its CH1 to the N-terminus of a second Fc subunit via a second hinge, a first immunostimulatory cytokine moiety (e.g., IL-12 or variant constructed as a single chain fusion) is positioned at the hinge region of one of the pairing polypeptide chains (such as the PD-L1/PD-L2-hinge-Fc chain), and a second immunostimulatory cytokine moiety (e.g., IL-2 or variant thereof) is positioned at the hinge region of the other chain of the pairing polypeptide chains (such as the CD155-hinge-Fc chain). Can be referred to as Fab/IL-12/IL-2/PD-L1-Fc or Fab/IL-12/IL-2/PD-L2-Fc.

[0026] FIGS. 15A-15D depict exemplary immunomodulatory molecules with two first binding domains (e.g., immunostimulatory cytokines such as IL-12, IL-2 or variant thereof, for example constructed as a single chain fusion), one is positioned at the hinge region of one polypeptide chain of a parental (ligand/receptor/antigen binding domain)-hinge-Fc fusion protein, and the other one is positioned at the C-terminus of one or both Fc subunits of the parental (ligand/receptor/antigen binding domain)-hinge-Fc fusion protein. FIG. 15A depicts an exemplary immunomodulatory molecule, wherein PD-L1 or PD-L2 extracellular domain (wildtype or mutant) is fused to N-terminus of an Fc domain via hinge, a first immunostimulatory cytokine moiety (e.g., IL-2 or variant) is positioned at the hinge region of one of the (PD-L1 or PD-L2)-hinge-Fc polypeptide chains, and a second immunostimulatory cytokine moiety (e.g., IL-12 or variant constructed as a single chain fusion) is positioned at the C′ of Fc subunit of the other chain of the (PD-L1 or PD-L2)-hinge-Fc polypeptide chains. Can be referred to as TL-2/PD-L1-Fc/IL-12 or IL-2/PD-L2-Fc/IL-12. FIG. 15B depicts an exemplary immunomodulatory molecule, wherein PD-L1 or PD-L2 extracellular domain (wildtype or mutant) is fused to the N-terminus of a first Fc subunit via a first hinge, a CD155 extracellular domain (wildtype or mutant) is fused to the N-terminus of a second Fc subunit via a second hinge, a first immunostimulatory cytokine moiety (e.g., IL-12 or variant constructed as a single chain fusion) is positioned at the C′ of Fc subunit of one of the pairing polypeptide chains (such as the PD-L1/PD-L2-hinge-Fc chain), and a second immunostimulatory cytokine moiety (e.g., IL-2 or variant thereof) is positioned at the hinge region of the other chain of the pairing polypeptide chains (such as the CD155-hinge-Fc chain). Can be referred to as IL-2/PD-L1-Fc/CD155-Fc/IL-12 or LL-2/PD-L2-Fc/CD155-Fc/IL-12. FIG. 15C depicts an exemplary immunomodulatory molecule, wherein PD-L1 or PD-L2 extracellular domain (wildtype or mutant) is fused to the N-terminus of a first Fc subunit via a first hinge, an antibody moiety (e.g., sdAb or scFv) specifically recognizing a target molecule (can be agonist, antagonist, or neutral Ab, regulating or not-regulating immune response) is fused to the N-terminus of a second Fc subunit via a second hinge, a first immunostimulatory cytokine moiety (e.g., IL-12 or variant constructed as a single chain fusion) is positioned at the C′ of Fc subunit of one of the pairing polypeptide chains (such as the PD-L1/PD-L2-hinge-Fc chain), and a second immunostimulatory cytokine moiety (e.g., IL-2 or variant thereof) is positioned at the hinge region of the other chain of the pairing polypeptide chains (such as the CD155-hinge-Fc chain). Can be referred to as sdAb/IL-2/PD-L1-Fc/IL-12 or sdAb/IL-2/PD-L2-Fc/IL-12. FIG. 15D depicts an exemplary immunomodulatory molecule, wherein PD-L1 or PD-L2 (wildtype or mutant) is fused to the N-terminus of a first Fc subunit via a first hinge, a Fab specifically recognizing a target molecule (can be agonist, antagonist, or neutral Ab, regulating or not-regulating immune response) is fused through its CH1 to the N-terminus of a second Fc subunit via a second hinge, a first immunostimulatory cytokine moiety (e.g., IL-12 or variant constructed as a single chain fusion) is positioned at the C′ of Fc subunit of one of the pairing polypeptide chains (such as the PD-L1/PD-L2-hinge-Fc chain), and a second immunostimulatory cytokine moiety (e.g., IL-2 or variant thereof) is positioned at the hinge region of the other chain of the pairing polypeptide chains (such as the CD155-hinge-Fc chain). Can be referred to as Fab/IL-2/PD-L1-Fc/IL-12 or Fab/IL-2/PD-L2-Fc/IL-12.

[0027] FIG. 16 shows 4T1 murine breast cancer tumors extracted from mammary gland fat pad of mice treated with IL-12(E59A/F60A)/PD-L2-Fc (IW-#29), IL-12(F60A)/PD-L2-Fc (IW-#30), a combination of anti-PD-1 and anti-CTLA-4 antibodies, or PBS (negative control).

[0028] FIG. 17 depicts 4T1 murine breast cancer cells metastasized to lungs in mice injected with 4T1 cells at mammary gland fat pad and treated with IL-12(E59A/F60A)/PD-L2-Fc (IW-#29), IL-12(F60A)/PD-L2-Fc (IW-#30), a combination of anti-PD-1 and anti-CTLA-4 antibodies, or PBS (negative control).

[0029] FIG. 18 depicts tumor volume in 4T1 syngeneic tumor mice treated with IL-12(E59A/F60A)/anti-PD-1 (IW-#48), IL-12(E59A/F60A)/PD-L2-Fc (IW-#29), IL-12(E59A/F60A)/IL-2(R38D/K43E/E61R)/anti-PD-1 (IW-#54) immunomodulatory molecules, or PBS (negative control). Black arrows indicate injection days.

[0030] FIG. 19 depicts tumor volume in EMT6 syngeneic tumor mice treated with IL-12(E59A/F60A)/anti-PD-1 (IW-#48), IL-12(E59A/F60A)/PD-L2-Fc (IW-#29), IL-2(R38D/K43E/E61R)/PD-L2-Fc (IW-#11) immunomodulatory molecules, or PBS (negative control). Black arrows indicate injection days.

### DETAILED DESCRIPTION OF THE INVENTION

[0031] Current immunotherapy often triggers too much undesired immune response such as immune cell over-activation, cytokine storm, etc. For example, cytokine therapy (e.g., for treating cancer) have shown limited success due to severe toxicity, which limits the dosing far below therapeutically effective dose. Immunocytokines, which are constructs with cytokines fused to antibodies, antigen-binding fragments, ligand-Fc fusion protein, or receptor-Fc fusion protein (hereinafter collectively referred to as “ligand/receptor-Fc fusion protein” or “ligand/receptor-hinge-Fc fusion protein”) can deliver cytokines to target cells (e.g., tumor cells, or immune effector cells) or tissues with the recognition of target antigens by the antibodies or antigen-binding fragments (e.g., antibody fragments, ligands, or receptors) within immunomodulatory molecules, which can both reduce non-specific (off-target) cytokine activities and/or associated toxicities (e.g., toxicities on healthy cells or tissues), and concentrate cytokine therapeutic effects at target sites (e.g., disease sites). The activation of immunomodulatory molecules can occur via trans-activation, which requires specific binding of the antibody or antigen-binding fragment to target antigens on tumor cells; or cis-activation, which requires specific binding of the antibody or antigen-binding fragment to target antigens on immune cells (see FIG. 10). Most immunocytokines developed nowadays have the cytokine moiety fused to the N-terminus or the C-terminus of the heavy chain or the light chain of a full-length antibody (such as Hu14.8-IL2, NHS-IL2LT, NHS-IL12, BC1-IL12; see, e.g., FIGS. 1C-IE) or fused to the N-terminus or the C-terminus of an antigen-binding fragment (e.g., diabody, scFv, such as L19-IL2 or F16-IL2), so cytokine-receptor binding/activation can still occur even in the absence of antibody-antigen recognition, leading to off-target toxicities. Immune checkpoint inhibitors developed in recent years (e.g., anti-PD-1, anti-CTLA-4 Abs), although have shown some great clinical success in cancer patients, also focused on up-regulating immune response, which can worsen systemic toxicity if further used together with pro-inflammatory cytokines.

[0032] The present invention provides immunomodulatory molecules with opposing effects in regulating immune responses, demonstrated significantly better toxicity profile and therapeutic efficacy. The immunomodulatory molecules comprise a first binding domain (e.g., immunostimulatory cytokine or variant thereof, such as IL-12, IL-2, IFN-γ) specifically recognizing a first target molecule (e.g., receptor of immunostimulatory cytokine or variant thereof) and a second binding domain (e.g., ligand such as PD-L1, PD-L2, CD155 extracellular domain or variant thereof) specifically recognizing a second target molecule (e.g., PD-1 or TIGIT on immune effector cell), wherein the first binding domain upon binding to the first target molecule up-regulates an immune response, and wherein the second binding domain upon binding to the second target molecule down-regulates the immune response. For example, when positioning an IL-12 cytokine (pro-inflammatory) at the hinge region of a PD-L2 extracellular domain-hinge-Fc fusion protein, the resulting IL-12/PD-L2-Fc immunomodulatory molecule not only specifically targeted IL-12 activity (e.g., activity of binding to IL-12 receptor, and/or IL-12 pro-inflammatory activity) to PD-1+target cells, but also stimulated PD-1 inhibitory immune checkpoint signaling via PD-L2-PD-1 binding, thus creating an immunosuppression signal that “balances against” or “counteracts” the immunostimulating activity of IL-12. Any agonist antibodies or ligands (e.g., PD-L2, PD-L1, CD80, or CD86) that can activate or stimulate an immunosuppressive signaling pathway (e.g., by binding to an inhibitory immune checkpoint molecule such as PD-1 or CTLA-4), or any antagonist antibodies, ligands, or receptors that can reduce or block an immunostimulatory signaling pathway (e.g., by binding to a stimulatory immune checkpoint molecule such as CD27 or CD28 or an immunostimulatory receptor such as IL-2R) can be used in combination with an immunostimulating cytokine or variant thereof (e.g., IL-2, IL-12, IFN-γ, or IL-23) to construct an immunomodulatory molecule with any of the immunomodulatory molecule configurations described herein. Any antagonist antibodies, ligands, or receptors that can reduce or block an immunosuppressive signaling pathway (e.g., by binding to an inhibitory immune checkpoint molecule such as PD-1 or CTLA-4), or any agonist antibodies or ligands (e.g., CD70, CD80, CD86, or IL-2) that can activate or stimulate an immunostimulatory signaling pathway (e.g., by binding to a stimulatory immune checkpoint molecule such as CD27 or CD28 or an immunostimulatory receptor such as IL-2R) can be used in combination with an immunosuppressive cytokine or variant thereof (e.g., IL-10, IL-27, IL-35, TGF-β) to construct an immunomodulatory molecule with any of the immunomodulatory molecule configurations described herein. The immunomodulatory molecules described herein can comprise one or more of first binding domains, and/or one or more of second binding domains, in order to achieve multiple immune response regulation. The multiple first binding domains can be the same or different. The multiple second binding domains can be the same or different. See FIGS. 1A-1W and 11A-15D for examples.

[0033] The first binding domain can include molecules such as immunostimulatory cytokines, ligands, or agonist antibodies (e.g., ligand or agonist Ab that stimulate stimulatory checkpoint molecules such as OX40), that target immune cells such as T cells, NK cells, DC cells, macrophages, and B cells. The present invention in some embodiments provide first binding domains with reduced activities (e.g., reduced binding or reducing stimulating activity to its target), such as compared to unmodified parental first binding domain. For example, see cytokine variants described herein, which exhibit drastically reduced activity compared to wildtype cytokines. Reducing the binding affinity of the first binding domain can skew the mechanism of action towards target-dependent activation (cis-activation) and away from target-independent activation (trans-activation).

[0034] The second binding domain can include molecules such as immunosuppressive cytokines, ligands, or agonist antibodies (e.g., ligand (such as PD-L1, PD-L2, CD155) or agonist Ab that stimulate inhibitory checkpoint molecules such as PD-1 or TIGIT), for down-regulating immune response. The present invention in some embodiments provide anti-PD-1 antibody (antagonist Ab) with reduced binding affinity to PD-1, hence reducing the immune response that could have been induced by a wild-type anti-PD-1 antibody (antagonist Ab, such as nivolumab) (see Example 22). The present invention in some embodiments also provide ligands with increased binding affinity to inhibitory checkpoint molecules such as PD-1, which can further down-regulate immune response compared to wildtype ligands. For example, see mutant PD-L1 and PD-L2 molecules generated in Example 23. Immunomodulatory molecules comprising mutant PD-L1 or PD-L2 extracellular domain as the second binding domain reduced adverse events compared to those with wildtype PD-L1 or PD-L2 extracellular domain. The low-binding affinity of PD-L2(mut) or PD-L1(mut) to PD-1 (more than 10⁻⁸ M K_{d}) compared to wildtype ligand, or the low-binding affinity of the mutant anti-PD-1 antibody (antagonist Ab; more than 10⁻⁸ M K_{d}) compared to wildtype anti-PD-1 antibody (less than 10⁻⁹ M K_{d}), allow immunomodulatory molecules thereof to target cancer cells expressing much higher level of PD-1, such as exhausted T-cells and tumor microenvironments trying the bypass anti-tumor activity, rather than any PD-1 positive cells.

[0035] For example, IL-12(E59A/F60A)/PD-L2(S58V)-Fc immunomodulatory molecule described herein provides both positive (IL-12/IL-12R signaling) and negative signals (PD-1/PD-L2 signaling). Immunomodulatory molecules with opposing effects described herein allow mimicking the native T-cell activation process, regulating the T cell activation process, and overcoming over-activation of the immune system.

[0036] The immunomodulatory molecules comprising the first and second binding domains described herein can further comprise a third binding domain specifically recognizing a third target molecule. The third binding domain can help localize the immunomodulatory molecule to a target site (e.g., the tumor microenvironment) by binding to the third target molecule (e.g., marker of exhausted T-cells, T cell surface marker, or tumor antigens). The third binding domain upon binding to the third target molecule can i) up-regulate the above mentioned or other immune response, or ii) down-regulate the above mentioned or other immune response; or iii) does not regulate any immune response by its own binding. For example, the third binding domain can function solely as a tumor antigen-targeting domain to bring the immunomodulatory molecule to tumor site, or as an immune effector cell-targeting domain to bring the immunomodulatory molecule to immune effector cells or strengthen its binding to immune effector cells. The intratumoral microenvironment contains a relatively high level of the exhausted T cells expressing several markers, such as TIGIT, TIM3, LAG3, and PD-1. Since the expression pattern and level of exhausted markers in the tumor microenvironment (TME) vary greatly, the third binding domain can be used to target additional exhausted markers to broadly target the TME. Alternatively, the third binding domain can be used to target specific cancers against specific tumor antigen, including but not limited to Her2, CEACAM, Her3, EGFR, Trop2, CLDN18.2, prostate-specific antigen, MUC1, EpCAM, GPC3, mesothelin (MSLN), Nectin4, Folate receptor alpha, tissue factor, etc. The third binding domain may also target T cell markers, including but not limited to CD4, CD8, CD3, CD2, CD5, CD7, CD40L, CD25, CD137, CD69, CTLA4, CD127, ICOS, etc. The third binding domain may also target dendritic cell markers, including but not limited to CD1c, CD11c, CD141, CD123, BDCA-2, BDCA-4, CLEC9A, XCR1, CD80, CD86, PD-L1, PD-L2, etc. The third binding domain may also target monocyte/macrophage markers, including but not limited to CSF1R, CD80, Cd86, CD11, CD14, CD68, CD163, CD16, CD32, CD64, etc. The third binding domain may also target neutrophil cell markers, including but not limited to CD11, CD16, CD32, etc. The immunomodulatory molecules described herein can comprise one or more of third binding domains, in order to achieve multiple immune response regulation or for enhanced targeting. The multiple third binding domains can be the same or different.

[0037] Further, the present invention also provides immunomodulatory molecules with certain unique configurations that address the issues faced by current cytokine/immunocytokine therapy. Particularly, some immunomodulatory molecules of the present invention decrease non-specific activities (i.e., antibody or antigen-binding fragment-independent binding) and increase specific activities (i.e., antibody or antigen-binding fragment-dependent binding) of a first binding domain (e.g., immunostimulatory cytokines) by positioning the first binding domain (e.g., cytokine or variant thereof) at a hinge region in between a second binding domain (e.g., ligand, receptor, VHH, scFv, or Fab) and an Fc domain subunit or portion thereof (e.g., CH2-CH3 fragment, or CH2 only, or CH3 only), for example, at a hinge region in between an scFv and an Fc domain subunit (e.g., an antigen-binding polypeptide comprising VH-VL-cytokine-Fc subunit, or VL-VH-cytokine-Fc subunit), at a hinge region in between the Fab and the Fc domain of a full-length antibody (e.g., an antigen-binding polypeptide comprising VH-CH1-cytokine-Fc subunit), or at a hinge region in between a ligand (or a receptor) and an Fc domain subunit (e.g., an antigen-binding polypeptide comprising ligand-cytokine-Fc subunit, or receptor-cytokine-Fc subunit). Without being bound by theory, it is believed that steric hindrance of the second binding domain (e.g., ligand, receptor, VHH, scFv, Fab) and the Fc domain or portion thereof reduces accessibility of the first binding domain (e.g., immunomodulatory cytokine or variant thereof) to its target molecule (e.g., receptor of immunomodulatory cytokine), or “masks” the first binding domain from binding to its first target molecule, in the absence of binding by the second binding domain to the second target molecule. Upon binding of the second binding domain to the second target molecule, on the other hand, the first binding domain becomes activated. Surprisingly, unlike other immunocytokine designs which “expose” the cytokine moiety at its N-terminus or C-terminus, the unique immunomodulatory molecule configuration of the present invention requires binding of the second binding domain (e.g., ligand, receptor, VHH, scFv, or Fab) to its second target molecule first before binding of the first binding domain (e.g., immunomodulatory cytokine moiety) to its first target molecule (e.g., receptor) can occur, thus ensuring that the up-regulation of the immune response (e.g., cytokine signaling activation) is entirely second binding domain-binding dependent (on-target). With this enhanced targeting specificity design, and optionally further in combination with reduced activities of the first binding domain discussed above (e.g., cytokine variants described herein), a desired immune response (e.g., cytokine signaling activation) can be safely delivered to target sites (e.g., tumor cells, or immune cells) to achieve therapeutic effects. Such unique targeting specificity design adds an additional regulatory layer to the current “balancing” or “counteracting” of immune response design, further fine-tuning the bioactivity and toxicity of immunomodulatory molecules described herein.

[0038] Accordingly, one aspect of the present application provides an immunomodulatory molecule comprising a first binding domain (e.g., ligand, VHH, scFv, or VH, for example immunostimulatory cytokine such as IL-2 or IL-12) specifically recognizing a first target molecule (e.g., cell surface antigen or receptor, such as receptor of immunostimulatory cytokine) and a second binding domain (e.g., ligand, VHH, scFv, or VH, for example agonist ligand such as PD-L1 or PD-L2, or agonist antigen-binding fragment such as anti-PD-1 agonist Fab, scFv, VH, VHH, or full-length antibody) specifically recognizing a second target molecule (e.g., cell surface antigen or receptor, for example inhibitory checkpoint molecule such as PD-1), wherein the first binding domain upon binding to the first target molecule up-regulates an immune response, and wherein the second binding domain upon binding to the second target molecule down-regulates the immune response.

[0039] Also provided are isolated nucleic acids encoding such immunomodulatory molecules, vectors comprising such nucleic acids, host cells comprising such nucleic acids or vectors, methods of producing such immunomodulatory molecules, pharmaceutical compositions and articles of manufacture comprising such immunomodulatory molecules, methods of modulating an immune response with such immunomodulatory molecules or pharmaceutical compositions thereof, and methods of treating diseases (e.g., cancer, viral infection, autoimmune diseases) with such immunomodulatory molecules or pharmaceutical compositions thereof.

### I. Definitions

[0040] The practice of the present invention will employ, unless indicated specifically to the contrary, conventional methods of virology, immunology, microbiology, molecular biology and recombinant DNA techniques within the skill of the art, many of which are described below for the purpose of illustration. Such techniques are explained fully in the literature. See, e.g., Current Protocols in Molecular Biology or Current Protocols in Immunology, John Wiley & Sons, New York, N.Y. (2009); Ausubel et al., Short Protocols in Molecular Biology, 3rd ed., John Wiley & Sons, 1995; Sambrook and Russell, Molecular Cloning: A Laboratory Manual (3rd Edition, 2001); Maniatis et al., Molecular Cloning: A Laboratory Manual (1982); DNA Cloning: A Practical Approach, vol. I&II (D. Glover, ed.); Oligonucleotide Synthesis (N. Gait, ed., 1984); Nucleic Acid Hybridization (B. Hames & S. Higgins, eds., 1985); Transcription and Translation (B. Hames & S. Higgins, eds., 1984); Animal Cell Culture (R Freshney, ed., 1986); Perbal, A Practical Guide to Molecular Cloning (1984) and other like references.

[0041] The term “immunocytokine”, as used herein refers to an antigen-binding protein (e.g., antibody, or antigen-binding fragment (e.g., ligand, receptor, or antibody fragment)) format, which is fused to a cytokine molecule. The antigen-binding protein (e.g., antibody, or antigen-binding fragment (e.g., ligand, receptor, or antibody fragment)) format may be any of those described herein, and the cytokine may be fused directly, or by means of a linker or chemical conjugation to the antigen-binding protein format.

[0042] The term “cytokine storm,” also known as a “cytokine cascade” or “hypercytokinemia,” is a potentially fatal immune reaction typically consisting of a positive feedback loop between cytokines and immune cells, with highly elevated levels of various cytokines (e.g., INF-γ, IL-10, IL-6, CCL2, etc.).

[0043] As used herein, when a binding domain (e.g., antibody, antigen-binding fragment, or ligand) is referred to as an “antagonist” of a target molecule (e.g., a receptor, or an immune checkpoint molecule), it means that upon target antigen binding, the binding domain (e.g., antibody, antigen-binding fragment, or ligand) blocks, suppresses, or reduces (e.g., reduces at least about any of 10%, 20%, 30%, 40%, 50%, 60%, 70%, 80%, 90%, or 100%) the biological activity of the target molecule (e.g., blocks receptor signaling). For example, an anti-PD-1 antagonist antibody is an antibody that reduces or blocks PD-1 signaling; an antagonist ligand of IL-12 receptor reduces or blocks IL-12 receptor signaling. When a binding domain (e.g., antibody, antigen-binding fragment, or ligand) is referred to as an “agonist” of a target molecule (e.g., a receptor, or an immune checkpoint molecule), it means that upon target molecule binding, the binding domain (e.g., antibody, antigen-binding fragment, or ligand) stimulates, activates, or enhances (e.g., enhances at least about any of 10%, 20%, 30%, 40%, 50%, 60%, 70%, 80%, 90%, 100%, or more) the biological activity of the target molecule (e.g., activates receptor signaling). For example, a wildtype PD-L2 ligand (e.g., extracellular domain) is an agonist that activates PD-1 signaling. For example, an anti-PD-1 agonist antibody is an antibody that induces or enhances PD-1 signaling.

[0044] As used herein, “treatment” or “treating” is an approach for obtaining beneficial or desired results including clinical results. For purposes of this invention, beneficial or desired clinical results include, but are not limited to, one or more of the following: alleviating one or more symptoms resulting from the disease, diminishing the extent of the disease, stabilizing the disease (e.g., preventing or delaying the worsening of the disease), preventing or delaying the spread (e.g., metastasis) of the disease, preventing or delaying the recurrence of the disease, delay or slowing the progression of the disease, ameliorating the disease state, providing a remission (partial or total) of the disease, decreasing the dose of one or more other medications required to treat the disease, delaying the progression of the disease, increasing the quality of life, and/or prolonging survival. Also encompassed by “treatment” is a reduction of pathological consequence of the disease. The methods of the invention contemplate any one or more of these aspects of treatment. For example, an individual is successfully “treated” if one or more symptoms associated with viral infection are mitigated or eliminated, including, but are not limited to, reducing the proliferation of (or destroying) infectious virus, decreasing symptoms resulting from the disease (e.g., cytokine storm), increasing the quality of life of those suffering from the disease, decreasing the dose of other medications required to treat the disease, and/or prolonging survival of individuals.

[0045] The term “prevent,” and similar words such as “prevented,” “preventing” etc., indicate an approach for preventing, inhibiting, or reducing the likelihood of the recurrence of, a disease or condition, e.g., cancer. It also refers to delaying the recurrence of a disease or condition or delaying the recurrence of the symptoms of a disease or condition. As used herein, “prevention” and similar words also includes reducing the intensity, effect, symptoms and/or burden of a disease or condition prior to recurrence of the disease or condition.

[0046] As used herein, “delaying” the development of a disease means to defer, hinder, slow, retard, stabilize, and/or postpone development of the disease. This delay can be of varying lengths of time, depending on the history of the disease and/or individual being treated. A method that “delays” development of a disease is a method that reduces probability of disease development in a given time frame and/or reduces the extent of the disease in a given time frame, when compared to not using the method. Such comparisons are typically based on clinical studies, using a statistically significant number of individuals. Cancer development can be detectable using standard methods, including, but not limited to, computerized axial tomography (CAT Scan), Magnetic Resonance Imaging (MRI), abdominal ultrasound, clotting tests, arteriography, or biopsy. Development may also refer to disease (e.g., cancer) progression that may be initially undetectable and includes occurrence, recurrence, and onset.

[0047] The term “effective amount” used herein refers to an amount of an agent or a combination of agents, sufficient to treat a specified disorder, condition or disease such as ameliorate, palliate, lessen, and/or delay one or more of its symptoms. In reference to cancer, an effective amount comprises an amount sufficient to cause a tumor to shrink and/or to decrease the growth rate of the tumor (such as to suppress tumor growth) or to prevent or delay other unwanted cell proliferation. In some embodiments, an effective amount is an amount sufficient to delay development. In some embodiments, an effective amount is an amount sufficient to prevent or delay recurrence. An effective amount can be administered in one or more administrations. The effective amount of the drug or composition may: (i) reduce the number of cancer cells; (ii) reduce tumor size; (iii) inhibit, retard, slow to some extent and preferably stop cancer cell infiltration into peripheral organs; (iv) inhibit (i.e., slow to some extent and preferably stop) tumor metastasis; (v) inhibit tumor growth; (vi) prevent or delay occurrence and/or recurrence of tumor; (vii) relieve to some extent one or more of the symptoms associated with the cancer; (viii) stimulate or activate immune cells (e.g., immune effector cells), e.g. for immune response, such as to produce cytokine(s), or for immune cell proliferation and/or differentiation; and/or (ix) prevent, reduce, or eliminate inflammation or autoimmune response, such as inhibiting pro-inflammatory cytokine secretion. In the case of viral infection, the effective amount of the agent may inhibit (i.e., reduce to some extent and preferably abolish) virus activity; control and/or attenuate and/or inhibit inflammation or a cytokine storm induced by said viral pathogen; prevent worsening, arrest and/or ameliorate at least one symptom of said viral infection or damage to said subject or an organ or tissue of said subject, emanating from or associated with said viral infection; control, reduce, and/or inhibit cell necrosis in infected and/or non-infected tissue and/or organ; control, ameliorate, and/or prevent the infiltration of inflammatory cells (e.g., NK cells, cytotoxic T cells, neutrophils) in infected or non-infected tissues and/or organs; and/or stimulate or activate immune cells (e.g., immune effector cells), e.g., for immune response, such as to produce cytokine(s), or for immune cell proliferation and/or differentiation.

[0048] As used herein, an “individual” or a “subject” refers to a mammal, including, but not limited to, human, bovine, horse, feline, canine, rodent, or primate. In some embodiments, the individual is a human.

[0049] The term “antibody” is used in its broadest sense and encompasses various antibody structures, including but not limited to monoclonal antibodies, polyclonal antibodies, multispecific antibodies (e.g., bispecific antibodies), full-length antibodies and antigen-binding fragments thereof, so long as they exhibit the desired antigen-binding activity. The term “antibody” includes conventional 4-chain antibodies, single-domain antibodies, and antigen-binding fragments thereof.

[0050] The basic 4-chain antibody unit is a heterotetrameric glycoprotein composed of two identical light (L) chains and two identical heavy (H) chains. An IgM antibody consists of 5 of the basic heterotetramer units along with an additional polypeptide called a J chain, and contains 10 antigen-binding sites, while IgA antibodies comprise from 2-5 of the basic 4-chain units which can polymerize to form polyvalent assemblages in combination with the J chain. In the case of IgGs, the 4-chain unit is generally about 150,000 Daltons. Each L chain is linked to an H chain by one covalent disulfide bond, while the two H chains are linked to each other by one or more disulfide bonds depending on the H chain isotype. Each H and L chain also has regularly spaced intrachain disulfide bridges. Each H chain has at the N-terminus, a variable domain (V_{H}) followed by three constant domains (C_{H}) for each of the α and γ chains and four CH domains for μ and ε isotypes. Each L chain has at the N-terminus, a variable domain (V_{L}) followed by a constant domain at its other end. The V_{L} is aligned with the V_{H} and the C_{L} is aligned with the first constant domain of the heavy chain (C_{H}1). Particular amino acid residues are believed to form an interface between the light chain and heavy chain variable domains. The pairing of a V_{H} and V_{L} together forms a single antigen-binding site. For the structure and properties of the different classes of antibodies, see e.g., Basic and Clinical Immunology, 8th Edition, Daniel P. Sties, Abba I. Terr and Tristram G. Parsolw (eds), Appleton & Lange, Norwalk, Conn., 1994, page 71 and Chapter 6. The L chain from any vertebrate species can be assigned to one of two clearly distinct types, called kappa and lambda, based on the amino acid sequences of their constant domains. Depending on the amino acid sequence of the constant domain of their heavy chains (C_{H}), immunoglobulins can be assigned to different classes or isotypes. There are five classes of immunoglobulins: IgA, IgD, IgE, IgG and IgM having heavy chains designated α, δ, ε, γ and μ, respectively. The γ and α classes are further divided into subclasses on the basis of relatively minor differences in the C_{H} sequence and function, e.g., humans express the following subclasses: IgG1, IgG2A, IgG2B, IgG3, IgG4, IgA1 and IgA2.

[0051] An “isolated” antibody (or construct) is one that has been identified, separated and/or recovered from a component of its production environment (e.g., natural or recombinant). Preferably, the isolated polypeptide is free of association with all other components from its production environment. Contaminant components of its production environment, such as that resulting from recombinant transfected cells, are materials that would typically interfere with research, diagnostic or therapeutic uses for the antibody, and may include enzymes, hormones, and other proteinaceous or non-proteinaceous solutes. In preferred embodiments, the polypeptide will be purified: (1) to greater than 95% by weight of antibody as determined by, for example, the Lowry method, and in some embodiments, to greater than 99% by weight; (2) to a degree sufficient to obtain at least 15 residues of N-terminal or internal amino acid sequence by use of a spinning cup sequenator; or (3) to homogeneity by SDS-PAGE under non-reducing or reducing conditions using Coomassie Blue or, preferably, silver stain. Isolated antibody (or construct) includes the antibody in situ within recombinant cells since at least one component of the antibody's natural environment will not be present. Ordinarily, however, an isolated polypeptide, antibody, or construct will be prepared by at least one purification step.

[0052] The “variable region” or “variable domain” of an antibody refers to the amino-terminal domains of the heavy or light chain of the antibody. The variable domains of the heavy chain and light chain may be referred to as “V_{H}” and “V_{L}”, respectively. These domains are generally the most variable parts of the antibody (relative to other antibodies of the same class) and contain the antigen binding sites. Heavy-chain only antibodies from the Camelid species have a single heavy chain variable region, which is referred to as “V_{H}H”. V_{H}H is thus a special type of V_{H}.

[0053] The term “variable” refers to the fact that certain segments of the variable domains differ extensively in sequence among antibodies. The V domain mediates antigen binding and defines the specificity of a particular antibody for its particular antigen. However, the variability is not evenly distributed across the entire span of the variable domains. Instead, it is concentrated in three segments called complementary determining regions (CDRs) or hypervariable regions (HVRs) both in the heavy chain and light chain variable domains. The more highly conserved portions of variable domains are called the framework regions (FR). The variable domains of native heavy and light chains each comprise four FR regions, largely adopting a beta-sheet configuration, connected by three CDRs, which form loops connecting, and in some cases forming part of, the beta-sheet structure. The CDRs in each chain are held together in close proximity by the FR regions and, with the CDRs from the other chain, contribute to the formation of the antigen-binding site of antibodies (see Kabat et al., Sequences of Immunological Interest, Fifth Edition, National Institute of Health, Bethesda, Md. (1991)). The constant domains are not involved directly in the binding of antibody to an antigen, but exhibit various effector functions, such as participation of the antibody in antibody-dependent cellular toxicity.

[0054] The term “monoclonal antibody” as used herein refers to an antibody obtained from a population of substantially homogeneous antibodies, i.e., the individual antibodies comprising the population are identical except for possible naturally occurring mutations and/or post-translation modifications (e.g., isomerizations, amidations) that may be present in minor amounts. Monoclonal antibodies are highly specific, being directed against a single antigenic site. In contrast to polyclonal antibody preparations, which typically include different antibodies directed against different determinants (epitopes), each monoclonal antibody is directed against a single determinant on the antigen. In addition to their specificity, the monoclonal antibodies are advantageous in that they are synthesized by the hybridoma culture, uncontaminated by other immunoglobulins. The modifier “monoclonal” indicates the character of the antibody as being obtained from a substantially homogeneous population of antibodies and is not to be construed as requiring production of the antibody by any particular method. For example, the monoclonal antibodies to be used in accordance with the present invention may be made by a variety of techniques, including, for example, the hybridoma method (e.g., Kohler and Milstein., Nature, 256:495-97 (1975): Hongo et al., Hybridoma, 14 (3): 253-260 (1995), Harlow et al., Antibodies: A Laboratory Manual, (Cold Spring Harbor Laboratory Press, 2^{nd} ed. 1988); Hammerling et al., in: Monoclonal Antibodies and T-Cell Hybridomas 563-681 (Elsevier, N.Y., 1981)), recombinant DNA methods (see, e.g., U.S. Pat. No. 4,816,567), phage-display technologies (see, e.g., Clackson et al., Nature, 352: 624-628 (1991). Marks et al., J. Mol. Biol. 222: 581-597 (1992); Sidhu et al., J. Mol. Biol. 338(2): 299-310 (2004); Lee et al., J. Mol. Biol. 340(5): 1073-1093 (2004); Fellouse, Proc. Natl. Acad. Sci. USA 101(34): 12467-12472 (2004); and Lee et al., J. Immunol. Methods 284(1-2): 119-132 (2004), and technologies for producing human or human-like antibodies in animals that have parts or all of the human immunoglobulin loci or genes encoding human immunoglobulin sequences (see, e.g., WO 1998/24893; WO 1996/34096; WO 1996/33735; WO 1991/10741; Jakobovits et al., Proc. Natl. Acad. Sci. USA 90: 2551 (1993); Jakobovits et al., Nature 362: 255-258 (1993); Bruggemann et al., Year in Immunol. 7:33 (1993); U.S. Pat. Nos. 5,545,807; 5,545,806; 5,569,825; 5,625,126; 5,633,425; and U.S. Pat. No. 5,661,016; Marks et al., Bio/Technology 10: 779-783 (1992); Lonberg et al., Nature 368: 856-859 (1994); Morrison, Nature 368: 812-813 (1994); Fishwild et al., Nature Biotechnol. 14: 845-851 (1996); Neuberger, Nature Biotechnol. 14: 826 (1996); and Lonberg and Huszar, Intern. Rev. Immunol. 13: 65-93 (1995).

[0055] The terms “full-length antibody”, “intact antibody”, or “whole antibody” are used interchangeably to refer to an antibody in its substantially intact form, as opposed to an antibody fragment. Specifically, full-length 4-chain antibodies include those with heavy and light chains including an Fc region. Full-length heavy-chain only antibodies include the heavy chain variable domain (such as V_{H}H) and an Fc region. The constant domains may be native sequence constant domains (e.g., human native sequence constant domains) or amino acid sequence variants thereof. In some cases, the intact antibody may have one or more effector functions. It is to be understood that for the present invention, reference to a “full-length antibody” also includes a full-length antibody backbone or parental full-length antibody (e.g., full-length 4-chain antibody, or full-length heavy-chain only antibody) whose hinge region has a first binding domain (e.g., cytokine moiety) positioned therein (see, e.g., FIGS. 1C, 1D, 1N, 1O).

[0056] An “antibody fragment”, “antigen-binding domain”, or “antigen-binding fragment” comprises a portion of an intact antibody, preferably the antigen binding and/or the variable region of the intact antibody. Examples of antibody fragments include, but are not limited to Fab, Fab′, F(ab′)₂ and Fv fragments; diabodies; linear antibodies (see U.S. Pat. No. 5,641,870, Example 2; Zapata et al., Protein Eng. 8(10): 1057-1062 (1995)); single-chain antibody (scFv) molecules; single-domain antibodies (such as V_{H}H), and multispecific antibodies formed from antibody fragments. Papain digestion of antibodies produced two identical antigen-binding fragments, called “Fab” fragments, and a residual “Fc” fragment, a designation reflecting the ability to crystallize readily. The Fab fragment consists of an entire L chain along with the variable domain of the H chain (V_{H}), and the first constant domain of one heavy chain (C_{H}1). Each Fab fragment is monovalent with respect to antigen binding, i.e., it has a single antigen-binding site. Pepsin treatment of an antibody yields a single large F(ab′)₂ fragment which roughly corresponds to two disulfide linked Fab fragments having different antigen-binding activity and is still capable of cross-linking antigen. Fab′ fragments differ from Fab fragments by having a few additional residues at the carboxy-terminus of the CH1 domain including one or more cysteines from the antibody hinge region. Fab′-SH is the designation herein for Fab′ in which the cysteine residue(s) of the constant domains bear a free thiol group. F(ab′)₂ antibody fragments originally were produced as pairs of Fab′ fragments which have hinge cysteines between them. Other chemical couplings of antibody fragments are also known. It is to be understood that for the present invention, reference to an “antigen-binding domain” or “antigen-binding fragment” also includes a ligand that can specifically recognizes a target receptor, or a receptor that can specifically recognizes a target ligand.

[0057] The term “constant domain” refers to the portion of an immunoglobulin molecule having a more conserved amino acid sequence relative to the other portion of the immunoglobulin, the variable domain, which contains the antigen-binding site. The constant domain contains the CH1, C_{H}2 and C_{H}3 domains (collectively, C_{H}) of the heavy chain and the CHL (or C_{L}) domain of the light chain.

[0058] The “heavy chain” of antibodies (immunoglobulins) can be divided into three functional regions: the Fd region, the hinge region, and the Fc region (fragment crystallizable). The Fd region comprises the V_{H} and CH1 domains and, in combination with the light chain, forms Fab—the antigen-binding fragment. The Fc fragment is responsible for the immunoglobulin effector functions, which include, for example, complement fixation and binding to cognate Fc receptors of effector cells. The hinge region, found in IgG, IgA, and IgD immunoglobulin classes, acts as a flexible spacer that allows the Fab portion to move freely in space relative to the Fc region. In contrast to the constant regions, the hinge domains are structurally diverse, varying in both sequence and length among immunoglobulin classes and subclasses. For heavy-chain only antibody, “heavy chain” includes the heavy chain variable domain (such as V_{H}H), a hinge region, and an Fc region. It is to be understood that for the present invention, reference to a “heavy chain” also includes a heavy chain comprising a VH domain, a hinge region, and an Fc domain or portion thereof (e.g., VL-VH-hinge-Fc domain subunit, or VH-VL-hinge-Fc domain subunit), and a heavy chain (e.g., heavy chain of a full-length 4-chain antibody, an VH-hinge-Fc-containing antibody, or heavy chain of a heavy-chain only antibody) comprising a first binding domain (e.g., cytokine moiety) positioned at the hinge region (see, e.g., FIGS. 1C, 1D, 1N, 1O).

[0059] The “light chains” of antibodies (immunoglobulins) from any mammalian species can be assigned to one of two clearly distinct types, called kappa (“κ”) and lambda (“λ”), based on the amino acid sequences of their constant domains.

[0060] “Fv” is the minimum antibody fragment which contains a complete antigen-recognition and -binding site. This fragment consists of a dimer of one heavy- and one light-chain variable region domain in tight, non-covalent association. From the folding of these two domains emanate six hypervariable loops (3 loops each from the H and L chain) that contribute the amino acid residues for antigen binding and confer antigen binding specificity to the antibody. However, even a single variable domain (or half of an Fv comprising only three CDRs specific for an antigen) has the ability to recognize and bind antigen, although at a lower affinity than the entire binding site.

[0061] “Single-chain Fv” also abbreviated as “sFv” or “scFv” are antibody fragments that comprise the V_{H} and V_{L} antibody domains connected into a single polypeptide chain. Preferably, the scFv polypeptide further comprises a polypeptide linker between the V_{H} and V_{L} domains which enables the scFv to form the desired structure for antigen binding. For a review of the scFv, see Pluckthun in The Pharmacology of Monoclonal Antibodies, vol. 113, Rosenburg and Moore eds., Springer-Verlag, New York, pp. 269-315 (1994).

[0062] The term “diabodies” refers to small antibody fragments prepared by constructing sFv fragments (see preceding paragraph) with short linkers (about 5-10 residues) between the V_{H} and V_{L} domains such that inter-chain but not intra-chain pairing of the V domains is achieved, thereby resulting in a bivalent fragment, i.e., a fragment having two antigen-binding sites. Bispecific diabodies are heterodimers of two “crossover” sFv fragments in which the V_{H} and V_{L} domains of the two antibodies are present on different polypeptide chains. Diabodies are described in greater detail in, for example, EP 404,097; WO 93/11161; Hollinger et al., Proc. Natl. Acad. Sci. USA 90: 6444-6448 (1993).

[0063] The monoclonal antibodies herein specifically include “chimeric” antibodies (immunoglobulins) in which a portion of the heavy and/or light chain is identical with or homologous to corresponding sequences in antibodies derived from a particular species or belonging to a particular antibody class or subclass, while the remainder of the chain(s) is(are) identical with or homologous to corresponding sequences in antibodies derived from another species or belonging to another antibody class or subclass, as well as fragments of such antibodies, so long as they exhibit the desired biological activity (U.S. Pat. No. 4,816,567; Morrison et al., Proc. Natl. Acad. Sci. USA, 81:6851-6855 (1984)). “Humanized antibody” is used as a subset of “chimeric antibodies”.

[0064] “Humanized” forms of non-human (e.g., llama or camelid) antibodies are chimeric antibodies that contain minimal sequence derived from non-human immunoglobulin. In some embodiments, a humanized antibody is a human immunoglobulin (recipient antibody) in which residues from an CDR (hereinafter defined) of the recipient are replaced by residues from an CDR of a non-human species (donor antibody) such as mouse, rat, rabbit, camel, llama, alpaca, or non-human primate having the desired specificity, affinity, and/or capacity. In some instances, framework (“FR”) residues of the human immunoglobulin are replaced by corresponding non-human residues. Furthermore, humanized antibodies may comprise residues that are not found in the recipient antibody or in the donor antibody. These modifications may be made to further refine antibody performance, such as binding affinity. In general, a humanized antibody will comprise substantially all of at least one, and typically two, variable domains, in which all or substantially all of the hypervariable loops correspond to those of a non-human immunoglobulin sequence, and all or substantially all of the FR regions are those of a human immunoglobulin sequence, although the FR regions may include one or more individual FR residue substitutions that improve antibody performance, such as binding affinity, isomerization, immunogenicity, etc. The number of these amino acid substitutions in the FR is typically no more than 6 in the H chain, and in the L chain, no more than 3. The humanized antibody optionally will also comprise at least a portion of an immunoglobulin constant region (Fc), typically that of a human immunoglobulin. For further details, see, e.g., Jones et al., Nature 321:522-525 (1986); Riechmann et al., Nature 332:323-329 (1988); and Presta, Curr. Op. Struct. Biol. 2:593-596 (1992). See also, for example, Vaswani and Hamilton, Ann. Allergy, Asthma & Immunol. 1:105-115 (1998); Harris, Biochem. Soc. Transactions 23:1035-1038 (1995): Hurle and Gross, Curr. Op. Biotech. 5:428-433 (1994); and U.S. Pat. Nos. 6,982,321 and 7,087,409.

[0065] A “human antibody” is an antibody that possesses an amino-acid sequence corresponding to that of an antibody produced by a human and/or has been made using any of the techniques for making human antibodies as disclosed herein. This definition of a human antibody specifically excludes a humanized antibody comprising non-human antigen-binding residues. Human antibodies can be produced using various techniques known in the art, including phage-display libraries. Hoogenboom and Winter, J. Mol. Biol., 227:381 (1991); Marks et al., J. Mol. Biol., 222:581 (1991). Also available for the preparation of human monoclonal antibodies are methods described in Cole et al., Monoclonal Antibodies and Cancer Therapy, Alan R. Liss, p. 77 (1985); Boerner et al., J. Immunol., 147(1):86-95 (1991). See also van Dijk and van de Winkel, Curr. Opin. Pharmacol. 5: 368-74 (2001). Human antibodies can be prepared by administering the antigen to a transgenic animal that has been modified to produce such antibodies in response to antigenic challenge, but whose endogenous loci have been disabled, e.g., immunized xenomice (see, e.g., U.S. Pat. Nos. 6,075,181 and 6,150,584 regarding XENOMOUSE™ technology). See also, for example, Li et al., Proc. Natl. Acad. Sci. USA, 103:3557-3562 (2006) regarding human antibodies generated via a human B-cell hybridoma technology.

[0066] The term “hypervariable region,” “HVR,” or “HV,” when used herein refers to the regions of an antibody variable domain which are hypervariable in sequence and/or form structurally defined loops. Generally, single-domain antibodies comprise three HVRs (or CDRs): HVR1 (or CDR1), HVR2 (or CDR2), and HVR3 (or CDR3). HVR3 (or CDR3) displays the most diversity of the three HVRs and is believed to play a unique role in conferring fine specificity to antibodies. See, e.g., Hamers-Casterman et al., Nature 363:446-448 (1993); Sheriff et al., Nature Struct. Biol. 3:733-736 (1996).

[0067] The term “Complementarity Determining Region” or “CDR” are used to refer to hypervariable regions as defined by the Kabat system. See Kabat et al., Sequences of Proteins of Immunological Interest, 5th Ed. Public Health Service, National Institutes of Health, Bethesda, Md. (1991).

[0068] A number of HVR delineations are in use and are encompassed herein. The Kabat Complementarity Determining Regions (CDRs) are based on sequence variability and are the most commonly used (Kabat et al., Sequences of Proteins of Immunological Interest, 5th Ed. Public Health Service, National Institutes of Health, Bethesda, Md. (1991)). Chothia refers instead to the location of the structural loops (Chothia and Lesk, J. Mol. Biol. 196:901-917 (1987)). The AbM HVRs represent a compromise between the Kabat HVRs and Chothia structural loops, and are used by Oxford Molecular's AbM antibody modeling software. The “contact” HVRs are based on an analysis of the available complex crystal structures. The residues from each of these HVRs are noted below in Table A.

TABLE A
HVR delineations

| Loop | Kabat | AbM | Chothia | Contact |
|---|---|---|---|---|
| L1 | L24-L34 | L24-L34 | L26-L32 | L30-L36 |
| L2 | L50-L56 | L50-L56 | L50-L52 | L46-L55 |
| L3 | L89-L97 | L89-L97 | L91-L96 | L89-L96 |
| H1 | H31-H35B | H26-H35B | H26-H32 | H30-H35B |

(Kabat Numbering)

| | | | | |
|---|---|---|---|---|
| H1 | H31-H35 | H26-H35 | H26-H32 | H30-H35 |

(Chothia Numbering)

| | | | | |
|---|---|---|---|---|
| H2 | H50-H65 | H50-H58 | H53-H55 | H47-H58 |
| H3 | H95-H102 | H95-H102 | H96-H101 | H93-H101 |

[0069] HVRs may comprise “extended HVRs” as follows: 24-36 or 24-34 (L1), 46-56 or 50-56 (L2) and 89-97 or 89-96 (L3) in the V_{L} and 26-35 (H1), 50-65 or 49-65 (H2) and 93-102, 94-102, or 95-102 (H3) in the V_{H}. The variable domain residues are numbered according to Kabat et al., supra, for each of these definitions.

[0070] The expression “variable-domain residue-numbering as in Kabat” or “amino-acid-position numbering as in Kabat,” and variations thereof, refers to the numbering system used for heavy-chain variable domains or light-chain variable domains of the compilation of antibodies in Kabat et al., supra. Using this numbering system, the actual linear amino acid sequence may contain fewer or additional amino acids corresponding to a shortening of, or insertion into, a FR or HVR of the variable domain. For example, a heavy-chain variable domain may include a single amino acid insert (residue 52a according to Kabat) after residue 52 of H2 and inserted residues (e.g. residues 82a, 82b, and 82c, etc. according to Kabat) after heavy-chain FR residue 82. The Kabat numbering of residues may be determined for a given antibody by alignment at regions of homology of the sequence of the antibody with a “standard” Kabat numbered sequence.

[0071] Unless indicated otherwise herein, the numbering of the residues in an immunoglobulin heavy chain is that of the EU index as in Kabat et al., supra. The “EU index as in Kabat” refers to the residue numbering of the human IgG1 EU antibody.

[0072] “Framework” or “FR” residues are those variable-domain residues other than the HVR residues as herein defined.

[0073] A “human consensus framework” or “acceptor human framework” is a framework that represents the most commonly occurring amino acid residues in a selection of human immunoglobulin V_{L} or V_{H} framework sequences. Generally, the selection of human immunoglobulin V_{L} or V_{H} sequences is from a subgroup of variable domain sequences. Generally, the subgroup of sequences is a subgroup as in Kabat et al., Sequences of Proteins of Immunological Interest, 5^{th} Ed. Public Health Service, National Institutes of Health, Bethesda, Md. (1991). Examples include for the V_{L}, the subgroup may be subgroup kappa I, kappa II, kappa III or kappa IV as in Kabat et al., supra. Additionally, for the VH, the subgroup may be subgroup I, subgroup II, or subgroup III as in Kabat et al. Alternatively, a human consensus framework can be derived from the above in which particular residues, such as when a human framework residue is selected based on its homology to the donor framework by aligning the donor framework sequence with a collection of various human framework sequences. An acceptor human framework “derived from” a human immunoglobulin framework or a human consensus framework may comprise the same amino acid sequence thereof, or it may contain pre-existing amino acid sequence changes. In some embodiments, the number of pre-existing amino acid changes are 10 or less, 9 or less, 8 or less, 7 or less, 6 or less, 5 or less, 4 or less, 3 or less, or 2 or less.

[0074] An “affinity-matured” antibody is one with one or more alterations in one or more CDRs thereof that result in an improvement in the affinity of the antibody for antigen, compared to a parent antibody that does not possess those alteration(s). In some embodiments, an affinity-matured antibody has nanomolar or even picomolar affinities for the target antigen. Affinity-matured antibodies are produced by procedures known in the art. For example, Marks et al., Bio/Technology 10:779-783 (1992) describes affinity maturation by V_{H}- and V_{L}-domain shuffling. Random mutagenesis of CDR and/or framework residues is described by, for example: Barbas et al. Proc Nat. Acad. Sci. USA 91:3809-3813 (1994); Schier et al. Gene 169:147-155 (1995); Yelton et al. J. Immunol. 155:1994-2004 (1995); Jackson et al., J. Immunol. 154(7):3310-9 (1995); and Hawkins et al, J. Mol. Biol. 226:889-896 (1992).

[0075] The term “epitope” means a protein determinant capable of specific binding to an antibody or antigen-binding fragment (e.g., ligand, receptor, VHH, scFv, Fab, etc.). Epitopes usually consist of chemically active surface groupings of molecules such as amino acids or sugar side chains and usually have specific three-dimensional structural characteristics, as well as specific charge characteristics. Conformational and non-conformational epitopes are distinguished in that the binding to the former but not the latter is lost in the presence of denaturing solvents.

[0076] As used herein, the term “specifically binds”, “specifically recognizes”, or is “specific for” refers to measurable and reproducible interactions such as binding between a target molecule and a binding domain (or cytokine and cytokine receptor), which is determinative of the presence of the target molecule (or cytokine) in the presence of a heterogeneous population of molecules including biological molecules. For example, an antigen binding protein (such as a Fab) that specifically binds a target molecule (which can be an epitope) is an antigen binding protein that binds this target with greater affinity, avidity, more readily, and/or with greater duration than it binds other target molecules. A cytokine that specifically binds a cytokine receptor is a cytokine that binds this cytokine receptor with greater affinity, avidity, more readily, and/or with greater duration than it binds other cytokine receptors. In some embodiments, the extent of binding of a binding domain (or cytokine) to an unrelated target molecule (or unrelated cytokine receptor) is less than about 10% of the binding of the binding domain (or cytokine) to the target molecule as measured (or the cytokine receptor as measured), e.g., by a radioimmunoassay (RIA). In some embodiments, an antigen binding protein that specifically binds a target (or a cytokine that specifically binds a cytokine receptor) has a dissociation constant (K_{D}) of ≤10⁻⁵ M, ≤10⁻⁶ M, ≤10⁻⁷ M, ≤10⁻⁸ M, ≤10⁻⁹ M, ≤10⁻¹⁰ M, ≤10⁻¹¹ M, or ≤10⁻¹² M. In some embodiments, an antigen binding protein (or cytokine receptor) specifically binds an epitope on a protein (or cytokine) that is conserved among the protein from different species. In some embodiments, specific binding can include, but does not require exclusive binding. Binding specificity of the antigen-binding protein or binding domain (or cytokine and cytokine receptor) can be determined experimentally by any protein binding methods known in the art. Such methods comprise, but are not limited to Western blots, ELISA-, RIA-, ECL-, IRMA-, EIA-, BIACORE™-tests and peptide scans.

[0077] The term “specificity” refers to selective recognition of a binding domain for a particular epitope of a target molecule. Natural antibodies, for example, are monospecific. The term “multispecific” as used herein denotes that an antigen binding protein has polyepitopic specificity (i.e., is capable of specifically binding to two, three, or more, different epitopes on one biological molecule or is capable of specifically binding to epitopes on two, three, or more, different biological molecules). “Bispecific” as used herein denotes that an antigen binding protein has two different antigen-binding specificities. Unless otherwise indicated, the order in which the antigens bound by a bispecific antibody listed is arbitrary. That is, for example, the terms “anti-CD3/HER2,” “anti-HER2/CD3,” “CD3×HER2” and “HER2×CD3” may be used interchangeably to refer to bispecific antibodies that specifically bind to both CD3 and HER2. The term “monospecific” as used herein denotes an antigen binding protein that has one or more binding sites each of which bind the same epitope of the same antigen.

[0078] The term “valent” as used herein denotes the presence of a specified number of binding sites in an antigen binding protein. A natural antibody for example or a full-length antibody has two binding sites and is bivalent. As such, the terms “trivalent”, “tetravalent”, “pentavalent” and “hexavalent” denote the presence of two binding site, three binding sites, four binding sites, five binding sites, and six binding sites, respectively, in an antigen binding protein.

[0079] “Antibody effector functions” refer to those biological activities attributable to the Fc region (a native sequence Fc region or amino acid sequence variant Fc region) of an antibody and vary with the antibody isotype. Examples of antibody effector functions include: C1q binding and complement dependent cytotoxicity; Fc receptor binding; antibody-dependent cell-mediated cytotoxicity (ADCC); phagocytosis; down regulation of cell surface receptors (e.g., B cell receptors); and B cell activation. “Reduced or minimized” antibody effector function means that which is reduced by at least 50% (alternatively 60%, 65%, 70%, 75%, 80%, 85%, 90%, 95%, 96%, 97%, 98%, or 99%) from the wild type or unmodified antibody. The determination of antibody effector function is readily determinable and measurable by one of ordinary skill in the art. In a preferred embodiment, the antibody effector functions of complement binding, complement dependent cytotoxicity and antibody dependent cytotoxicity are affected. In some embodiments, effector function is eliminated through a mutation in the constant region that eliminated glycosylation, e.g., “effectorless mutation.” In some embodiments, the effectorless mutation is an N297A or DANA mutation (D265A+N297A) in the C_{H}2 region. Shields et al., J. Biol. Chem. 276 (9): 6591-6604 (2001). Alternatively, additional mutations resulting in reduced or eliminated effector function include: K322A and L234A/L235A (LALA). Alternatively, effector function can be reduced or eliminated through production techniques, such as expression in host cells that do not glycosylate (e.g., E. coli.) or in which result in an altered glycosylation pattern that is ineffective or less effective at promoting effector function (e.g., Shinkawa et al., J. Biol. Chem. 278(5): 3466-3473 (2003).

[0080] “Antibody-dependent cell-mediated cytotoxicity” or ADCC refers to a form of cytotoxicity in which secreted Ig bound onto Fc receptors (FcRs) present on certain cytotoxic cells (e.g., natural killer (NK) cells, neutrophils and macrophages) enable these cytotoxic effector cells to bind specifically to an antigen-bearing target cell and subsequently kill the target cell with cytotoxins. The antibodies “arm” the cytotoxic cells and are required for killing of the target cell by this mechanism. The primary cells for mediating ADCC, NK cells, express FcγRIII only, whereas monocytes express FcγRI, FcγRII, and FcγRIII. Fc expression on hematopoietic cells is summarized in Table 2 on page 464 of Ravetch and Kinet, Annu. Rev. Immunol. 9: 457-92 (1991). To assess ADCC activity of a molecule of interest, an in vitro ADCC assay, such as that described in U.S. Pat. No. 5,500,362 or 5,821,337 may be performed. Useful effector cells for such assays include peripheral blood mononuclear cells (PBMC) and natural killer (NK) cells. Alternatively, or additionally, ADCC activity of the molecule of interest may be assessed in vivo, e.g., in an animal model such as that disclosed in Clynes et al., PNAS USA 95:652-656 (1998).

[0081] “Complement dependent cytotoxicity” or “CDC” refers to the lysis of a target cell in the presence of complement. Activation of the classical complement pathway is initiated by the binding of the first component of the complement system (C1q) to antibodies (of the appropriate subclass) which are bound to their cognate antigen. To assess complement activation, a CDC assay, e.g., as described in Gazzano-Santoro et al., J. Immunol. Methods 202: 163 (1996), may be performed. Antibody variants with altered Fc region amino acid sequences and increased or decreased C1q binding capability are described in U.S. Pat. No. 6,194,551B1 and WO99/51642. The contents of those patent publications are specifically incorporated herein by reference. See, also, Idusogie et al. J. Immunol. 164: 4178-4184 (2000).

[0082] The term “Fc region,” “fragment crystallizable region,” “Fc fragment,” or “Fc domain” herein is used to define a C-terminal region of an immunoglobulin heavy chain, including native-sequence Fc regions and variant Fc regions. Although the boundaries of the Fc region of an immunoglobulin heavy chain might vary, the human IgG heavy-chain Fc region is usually defined to stretch from an amino acid residue at position Cys226, or from Pro230, to the carboxyl-terminus thereof. The C-terminal lysine (residue 447 according to the EU numbering system) of the Fc region may be removed, for example, during production or purification of the antibody or Fc-fusion protein, or by recombinantly engineering the nucleic acid encoding a heavy chain of the antibody or Fc-fusion protein. Accordingly, a composition of intact antibodies may comprise antibody populations with all K447 residues removed, antibody populations with no K447 residues removed, and antibody populations having a mixture of antibodies with and without the K447 residue. Suitable native-sequence Fc regions for use in the immunomodulatory molecules described herein include human IgG1, IgG2 (IgG2A, IgG2B), IgG3 and IgG4.

[0083] The term IgG “isotype” or “subclass” as used herein is meant any of the subclasses of immunoglobulins defined by the chemical and antigenic characteristics of their constant regions. There are five major classes of immunoglobulins: IgA, IgD, IgE, IgG, and IgM, and several of these may be further divided into subclasses (isotypes), e.g., IgG1, IgG2, IgG3, IgG4, IgA1, and IgA2. The heavy chain constant domains that correspond to the different classes of immunoglobulins are called α, γ, ε, γ, and μ, respectively. The subunit structures and three-dimensional configurations of different classes of immunoglobulins are well known and described generally in, for example, Abbas et al. Cellular and Mol. Immunology, 4th ed. (W.B. Saunders, Co., 2000).

[0084] “Fc receptor” or “FcR” describes a receptor that binds the Fc region of an antibody or Fc-fusion protein. The preferred FcR is a native sequence human FcR. Moreover, a preferred FcR is one which binds an IgG antibody (a gamma receptor) and includes receptors of the FcγRI, FcγRII, and FcγRIII subclasses, including allelic variants and alternatively spliced forms of these receptors, FcγRII receptors include FcγRIIA (an “activating receptor”) and FcγRIIB (an “inhibiting receptor”), which have similar amino acid sequences that differ primarily in the cytoplasmic domains thereof. Activating receptor FcγRIIA contains an immunoreceptor tyrosine-based activation motif (ITAM) in its cytoplasmic domain. Inhibiting receptor FcγRIIB contains an immunoreceptor tyrosine-based inhibition motif (ITIM) in its cytoplasmic domain. (See M. Daëron, Annu. Rev. Immunol. 15:203-234 (1997). FcRs are reviewed in Ravetch and Kinet, Annu. Rev. Immunol. 9: 457-92 (1991); Capel et al., Immunomethods 4: 25-34 (1994); and de Haas et al., J. Lab. Clin. Med. 126: 330-41 (1995). Other FcRs, including those to be identified in the future, are encompassed by the term “FcR” herein.

[0085] The term “Fc receptor” or “FcR” also includes the neonatal receptor, FcRn, which is responsible for the transfer of maternal IgGs to the fetus. Guyer et al., J. Immunol. 117: 587 (1976) and Kim et al., J. Immunol. 24: 249 (1994). Methods of measuring binding to FcRn are known (see, e.g., Ghetie and Ward, Immunol. Today 18: (12): 592-8 (1997); Ghetie et al., Nature Biotechnology 15 (7): 637-40 (1997); Hinton et al., J. Biol. Chem. 279 (8): 6213-6 (2004); WO 2004/92219 (Hinton et al.). Binding to FcRn in vivo and serum half-life of human FcRn high-affinity binding polypeptides can be assayed, e.g., in transgenic mice or transfected human cell lines expressing human FcRn, or in primates to which the polypeptides having a variant Fc region are administered. WO 2004/42072 (Presta) describes antibody variants which improved or diminished binding to FcRs. See also, e.g., Shields et al., J. Biol. Chem. 9(2): 6591-6604 (2001).

[0086] “Binding affinity” generally refers to the strength of the sum total of non-covalent interactions between a single binding site of a molecule (e.g., an antibody, antigen-binding fragment (such as ligand, receptor, VHH, scFv, etc.), or cytokine) and its binding partner (e.g., an antigen (such as cell surface molecule, receptor, ligand, etc.), or cytokine receptor). Unless indicated otherwise, as used herein, “binding affinity” refers to intrinsic binding affinity that reflects a 1:1 interaction between members of a binding pair. Binding affinity can be indicated by K_{d}, K_{off}, Kₒₙ, or Kₐ. The term “K_{off}”, as used herein, is intended to refer to the off-rate constant for dissociation of an antibody (or antigen-binding fragment) from the antibody (or antigen-binding fragment)/antigen complex (e.g., ligand-receptor complex), or the off rate constant for dissociation of a cytokine from the cytokine/cytokine receptor complex, as determined from a kinetic selection set up, expressed in units of s⁻¹. The term “Kₒₙ”, as used herein, is intended to refer to the on-rate constant for association of an antibody (or antigen-binding fragment) to the antigen to form the antibody (or antigen-binding fragment)/antigen complex, or the on rate constant for association of a cytokine to the cytokine receptor to form the cytokine/cytokine receptor complex, expressed in units of M⁻¹s⁻¹. The term equilibrium dissociation constant “K_{D}” or “K_{d}”, as used herein, refers to the dissociation constant of a particular antibody (or antigen-binding fragment)-antigen interaction (or cytokine-cytokine receptor interaction), and describes the concentration of antigen (or cytokine) required to occupy one half of all of the antibody-binding domains (or antigen-binding fragment) present in a solution of antibody (or antigen-binding fragment) molecules (or cytokine receptor) at equilibrium, and is equal to K_{off}/Kₒₙ, expressed in units of M. The measurement of K_{d} presupposes that all binding agents are in solution. In the case where the antibody (or antigen-binding fragment) is tethered to a cell wall, e.g., in a yeast expression system, the corresponding equilibrium rate constant is expressed as EC50, which gives a good approximation of K_{d}. The affinity constant, Kₐ, is the inverse of the dissociation constant, K_{d}, expressed in units of M⁻¹. The dissociation constant (K_{D} or K_{d}) is used as an indicator showing affinity of antibodies (or antigen-binding fragments) to antigens (or cytokines to cytokine receptors). For example, easy analysis is possible by the Scatchard method using antibodies (or antigen-binding fragments) marked with a variety of marker agents, as well as by using BIACORE™ X (made by Amersham Biosciences), which is an over-the-counter, measuring kit, or similar kit, according to the user's manual and experiment operation method attached with the kit. The K_{D} value that can be derived using these methods is expressed in units of M (Mols). An antibody or antigen-binding fragment thereof (or cytokine) that specifically binds to a target (or cytokine receptor) may have a dissociation constant (K_{d}) of, for example, ≤10⁻⁵ M, ≤10⁻⁶ M, ≤10⁻⁷ M, ≤10⁻⁸ M, ≤10⁻⁹ M, ≤10⁻¹⁰ M, ≤10⁻¹¹ M, or ≤10⁻¹² M.

[0087] Half maximal inhibitory concentration (IC₅₀) is a measure of the effectiveness of a substance (such as an antibody or antigen-binding fragment) in inhibiting a specific biological or biochemical function. It indicates how much of a particular drug or other substance (inhibitor, such as an antibody or antigen-binding fragment) is needed to inhibit a given biological process by half. The values are typically expressed as molar concentration. IC₅₀ is comparable to an “EC₅₀” for agonist drug or other substance (such as an antibody, antigen-binding fragment, or a cytokine). EC₅₀ also represents the plasma concentration required for obtaining 50% of a maximum effect in vivo. As used herein, an “IC₅₀” is used to indicate the effective concentration of an antibody or antigen-binding fragment needed to neutralize 50% of the antigen bioactivity in vitro. IC₅₀ or EC₅₀ can be measured by bioassays such as inhibition of ligand binding by FACS analysis (competition binding assay), cell-based cytokine release assay, or amplified luminescent proximity homogeneous assay (AlphaLISA).

[0088] “Covalent bond” as used herein refers to a stable bond between two atoms sharing one or more electrons. Examples of covalent bonds include, but are not limited to, peptide bonds and disulfide bonds. As used herein, “peptide bond” refers to a covalent bond formed between a carboxyl group of an amino acid and an amine group of an adjacent amino acid. A “disulfide bond” as used herein refers to a covalent bond formed between two sulfur atoms, such as a combination of two Fc fragments (or cytokine subunits) by one or more disulfide bonds. One or more disulfide bonds may be formed between the two fragments by linking the thiol groups in the two fragments. In some embodiments, one or more disulfide bonds can be formed between one or more cysteines of two Fc fragments. Disulfide bonds can be formed by oxidation of two thiol groups. In some embodiments, the covalent linkage is directly linked by a covalent bond. In some embodiments, the covalent linkage is directly linked by a peptide bond or a disulfide bond.

[0089] “Percent (%) amino acid sequence identity” and “homology” with respect to a peptide, polypeptide or antibody sequence are defined as the percentage of amino acid residues in a candidate sequence that are identical with the amino acid residues in the specific peptide or polypeptide sequence, after aligning the sequences and introducing gaps, if necessary, to achieve the maximum percent sequence identity, and not considering any conservative substitutions as part of the sequence identity. Alignment for purposes of determining percent amino acid sequence identity can be achieved in various ways that are within the skill in the art, for instance, using publicly available computer software such as BLAST, BLAST-2, ALIGN or MEGALIGN™ (DNASTAR) software. Those skilled in the art can determine appropriate parameters for measuring alignment, including any algorithms needed to achieve maximal alignment over the full-length of the sequences being compared.

[0090] As used herein, the “C terminus” of a polypeptide refers to the last amino acid residue of the polypeptide which donates its amine group to form a peptide bond with the carboxyl group of its adjacent amino acid residue. “N terminus” of a polypeptide as used herein refers to the first amino acid of the polypeptide which donates its carboxyl group to form a peptide bond with the amine group of its adjacent amino acid residue.

[0091] An “isolated” nucleic acid molecule encoding a construct, antibody, or antigen-binding fragment thereof described herein is a nucleic acid molecule that is identified and separated from at least one contaminant nucleic acid molecule with which it is ordinarily associated in the environment in which it was produced. Preferably, the isolated nucleic acid is free of association with all components associated with the production environment. The isolated nucleic acid molecules encoding the constructs, polypeptides, and antibodies described herein is in a form other than in the form or setting in which it is found in nature. Isolated nucleic acid molecules therefore are distinguished from nucleic acid encoding the constructs, polypeptides and antibodies described herein existing naturally in cells. An isolated nucleic acid includes a nucleic acid molecule contained in cells that ordinarily contain the nucleic acid molecule, but the nucleic acid molecule is present extrachromosomally or at a chromosomal location that is different from its natural chromosomal location.

[0092] The term “control sequences” refers to DNA sequences necessary for the expression of an operably linked coding sequence in a particular host organism. The control sequences that are suitable for prokaryotes, for example, include a promoter, optionally an operator sequence, and a ribosome binding site. Eukaryotic cells are known to utilize promoters, polyadenylation signals, and enhancers.

[0093] Nucleic acid is “operably linked” when it is placed into a functional relationship with another nucleic acid sequence. For example, DNA for a presequence or secretory leader is operably linked to DNA for a polypeptide if it is expressed as a preprotein that participates in the secretion of the polypeptide; a promoter or enhancer is operably linked to a coding sequence if it affects the transcription of the sequence; or a ribosome binding site is operably linked to a coding sequence if it is positioned so as to facilitate translation. Generally, “operably linked” means that the DNA sequences being linked are contiguous, and, in the case of a secretory leader, contiguous and in reading phase. However, enhancers do not have to be contiguous. Linking is accomplished by ligation at convenient restriction sites. If such sites do not exist, the synthetic oligonucleotide adaptors or linkers are used in accordance with conventional practice.

[0094] The term “vector,” as used herein, refers to a nucleic acid molecule capable of propagating another nucleic acid to which it is linked. The term includes the vector as a self-replicating nucleic acid structure as well as the vector incorporated into the genome of a host cell into which it has been introduced. Certain vectors are capable of directing the expression of nucleic acids to which they are operatively linked. Such vectors are referred to herein as “expression vectors.”

[0095] The term “transfected” or “transformed” or “transduced” as used herein refers to a process by which exogenous nucleic acid is transferred or introduced into the host cell. A “transfected” or “transformed” or “transduced” cell is one which has been transfected, transformed or transduced with exogenous nucleic acid. The cell includes the primary subject cell and its progeny.

[0096] The terms “host cell,” “host cell line,” and “host cell culture” are used interchangeably and refer to cells into which exogenous nucleic acid has been introduced, including the progeny of such cells. Host cells include “transformants” and “transformed cells,” which include the primary transformed cell and progeny derived therefrom without regard to the number of passages. Progeny may not be completely identical in nucleic acid content to a parent cell, but may contain mutations. Mutant progeny that have the same function or biological activity as screened or selected for in the originally transformed cell are included herein.

[0097] The term “pharmaceutical formulation” of “pharmaceutical composition” refers to a preparation that is in such form as to permit the biological activity of the active ingredient to be effective, and that contains no additional components that are unacceptably toxic to a subject to which the formulation would be administered. Such formulations are sterile. A “sterile” formulation is aseptic or free from all living microorganisms and their spores.

[0098] It is understood that embodiments of the invention described herein include “consisting” and/or “consisting essentially of” embodiments.

[0099] Reference to “about” a value or parameter herein includes (and describes) variations that are directed to that value or parameter per se. For example, description referring to “about X” includes description of “X”.

[0100] As used herein, reference to “not” a value or parameter generally means and describes “other than” a value or parameter. For example, the method is not used to treat cancer of type X means the method is used to treat cancer of types other than X.

[0101] The term “about X-Y” used herein has the same meaning as “about X to about Y.”

[0102] As used herein and in the appended claims, the singular forms “a,” “or,” and “the” include plural referents unless the context clearly dictates otherwise.

### II. Immunomodulatory Molecules

[0103] The present invention in one aspect provides an immunomodulatory molecule comprising a first binding domain (e.g., immunostimulatory cytokine such as IL-2 or IL-12 or variant thereof) specifically recognizing a first target molecule (e.g., receptor of immunostimulatory cytokine) and a second binding domain (e.g., agonist ligand such as PD-L1 or PD-L2 or variant thereof, or agonist antigen-binding fragment such as anti-PD-1 agonist Fab, scFv, V_{H}H, or full-length antibody) specifically recognizing a second target molecule (e.g., inhibitory checkpoint molecule such as PD-1), wherein the first binding domain upon binding to the first target molecule up-regulates an immune response, and wherein the second binding domain upon binding to the second target molecule down-regulates the immune response. In some embodiments, the immunomodulatory molecule further comprises a third binding domain (e.g., antigen-binding fragment) specifically recognizing a third target molecule, such as a cell surface antigen on an immune effector cell (e.g., CD3, PD-1, CTLA-4) or a cancer cell (e.g., tumor antigen). In some embodiments, the third binding domain upon binding to the third target molecule up-regulate or down-regulate the immune response. In some embodiments, the third binding domain upon binding to the third target molecule does not regulate the immune response.

[0104] In some embodiments, the first binding domain and/or the second binding domain and/or the third binding domain is a VHH. In some embodiments, the first binding domain and/or the second binding domain and/or the third binding domain is an scFv. In some embodiments, the first binding domain and/or the second binding domain and/or the third binding domain is a Fab. In some embodiments, the first binding domain and/or the second binding domain and/or the third binding domain is a single chain ligand (e.g., PD-L2 extracellular domain, or cytokine) or receptor. For example, the first domain can be a dimeric cytokine moiety formed by a first cytokine subunit recombinantly linked to a second cytokine subunit via an optional linker. In some embodiments, the first binding domain and/or the second binding domain and/or the third binding domain is a ligand or a receptor formed by two polypeptide chains. For example, the first domain can be a dimeric cytokine moiety formed by a first cytokine subunit in one polypeptide chain and a second cytokine subunit in another polypeptide chain. In some embodiments, the first binding domain or portion thereof is fused to the N-terminus of the second binding domain or portion thereof. In some embodiments, the first binding domain or portion thereof is fused to the C-terminus of the second binding domain or portion thereof. In some embodiments, the first binding domain or portion thereof is fused to the N-terminus of the third binding domain or portion thereof. In some embodiments, the first binding domain or portion thereof is fused to the C-terminus of the third binding domain or portion thereof. In some embodiments, the third binding domain or portion thereof is fused to the N-terminus of the second binding domain or portion thereof. In some embodiments, the third binding domain or portion thereof is fused to the C-terminus of the second binding domain or portion thereof. The immunomodulatory molecules can have any configuration/components exemplified in FIGS. 1A-1W and 11A-15D, and described in any Example and Sequence Listing herein.

[0105] In some embodiments, the first binding domain is a VHH. In some embodiments, the first binding domain is an scFv. In some embodiments, the first binding domain is a single chain ligand (e.g., PD-L2, or cytokine) or receptor. In some embodiments, the second binding domain is a Fab. In some embodiments, the first binding domain is fused to the N-terminus of the VH of the Fab. In some embodiments, the first binding domain is fused to the N-terminus of the VL of the Fab. In some embodiments, the first binding domain is fused to the C-terminus of the CH of the Fab. In some embodiments, the first binding domain is fused to the C-terminus of the CL of the Fab. In some embodiments, the first binding domain is a Fab.

[0106] In some embodiments, the second binding domain is a VHH. In some embodiments, the second binding domain is an scFv. In some embodiments, the second binding domain is a single chain ligand (e.g., PD-L2, or cytokine) or receptor. In some embodiments, the first binding domain is a Fab. In some embodiments, the second binding domain is fused to the N-terminus of the VH of the Fab. In some embodiments, the second binding domain is fused to the N-terminus of the VL of the Fab. In some embodiments, the second binding domain is fused to the C-terminus of the CH of the Fab. In some embodiments, the second binding domain is fused to the C-terminus of the CL of the Fab. In some embodiments, the second binding domain is a Fab.

[0107] In some embodiments, the third binding domain is a VHH. In some embodiments, the third binding domain is an scFv. In some embodiments, the third binding domain is a Fab. In some embodiments, the third binding domain is a ligand or a receptor (e.g., extracellular domain of a ligand or a receptor).

[0108] In some embodiments, the first binding domain is positioned at a hinge region of the immunomodulatory molecule, such as at a hinge region between the second binding domain and an Fc domain subunit or portion thereof. In some embodiments, the first binding domain is not positioned at a hinge region of the immunomodulatory molecule, such as is positioned at C′ of one or both Fc subunits of a parental Fc-fusion protein or an Fc-containing parental antibody.

[0109] In some embodiments, the immunomodulatory molecule comprises: i) an antigen-binding protein comprising an antigen-binding polypeptide; and ii) the first binding domain (e.g., immunostimulatory cytokine such as IL-2 or IL-12 or variant thereof), wherein the antigen-binding polypeptide comprises from N-terminus to C-terminus: the second binding domain or portion thereof (e.g., agonist ligand such as PD-L1 or PD-L2 or variant thereof, or agonist antigen-binding fragment such as anti-PD-1 agonist Fab, scFv, VHH), a hinge region, and an Fc domain subunit or portion thereof, and wherein the first binding domain is positioned at the hinge region. Thus in some embodiments, there is provided an immunomodulatory molecule comprising i) an antigen-binding protein comprising an antigen-binding polypeptide; and ii) a first binding domain (e.g., immunostimulatory cytokine such as IL-2 or IL-12 or variant thereof) specifically recognizing a first target molecule (e.g., receptor of immunostimulatory cytokine), wherein the antigen-binding polypeptide comprises from N-terminus to C-terminus: a second binding domain or portion thereof (e.g., agonist ligand such as PD-L1 or PD-L2 or variant thereof, or agonist antigen-binding fragment such as anti-PD-1 agonist Fab, scFv, VHH) specifically recognizing a second target molecule (e.g., inhibitory checkpoint molecule such as PD-1), a hinge region, and an Fc domain subunit or portion thereof, wherein the first binding domain is positioned at the hinge region, wherein the first binding domain upon binding to the first target molecule up-regulates an immune response, and wherein the second binding domain upon binding to the second target molecule down-regulates the immune response. In some embodiments, in the presence of binding of the second binding domain to the second target molecule, the activity of the first binding domain increases at least about 20% (such as at least about any of 30%, 40%, 50%, 60%, 70%, 80%, 900%, 100%, 200%, 300%, 400%, 500%, or more) compared to that in the absence of binding of the second binding domain to the second target molecule. In some embodiments, in the absence of binding of the second binding domain to the second target molecule, the activity of the first binding domain positioned at the hinge region is no more than about 70% (such as no more than about any of 60%, 50%, 40%, 30%, 20%, 10%, 9%, 8%, 7%, 6%, 5%, 4%, 3%, 2%, 1%, 0.9%, 0.8%, 0.7%, 0.6%, 0.5%, 0.4%, 0.3%, 0.2%, 0.1%, or 0%) of that of a corresponding first binding domain in a free state. In some embodiments, the antigen-binding protein comprises two antigen-binding polypeptides each comprising a hinge region, and wherein only one antigen-binding polypeptide comprises the first binding domain positioned at the hinge region. In some embodiments, the antigen-binding protein comprises two antigen-binding polypeptides each comprising a hinge region, and wherein each antigen-binding polypeptide comprises a first binding domain positioned at the hinge region. In some embodiments, the immunomodulatory molecule comprises two or more first binding domains, wherein the two or more first binding domains are positioned in tandem at the hinge region of the antigen-binding polypeptide. In some embodiments, the first binding domain is an immunostimulatory cytokine or variant thereof. In some embodiments, the immunostimulatory cytokine is selected from the group consisting of IL-1, IL-2, IL-3, IL-4, IL-5, IL-6, IL-7, IL-8, IL-9, IL-12, IL-15, IL-17, IL-18, IL-21, IL-22, IL-23, IL-27, IFN-α, IFN-β, IFN-γ, TNF-α, erythropoietin, thrombopoietin, G-CSF, M-CSF, SCF, and GM-CSF. In some embodiments, the first binding domain is an immunostimulatory cytokine variant, and wherein the activity of the immunostimulatory cytokine variant in a free state is no more than about 80% (such as no more than about any of 70%, 60%, 50%, 40%, 30%, 20%, 10%, or 5%) of that of a corresponding wildtype immunostimulatory cytokine in a free state. In some embodiments, the immunostimulatory cytokine or variant thereof is a monomeric immunostimulatory cytokine or variant thereof. In some embodiments, the immunostimulatory cytokine or variant thereof is a dimeric immunostimulatory cytokine or variant thereof. In some embodiments, both subunits of the dimeric immunostimulatory cytokine or variant thereof are positioned in tandem at the hinge region of the antigen-binding polypeptide. In some embodiments, the antigen-binding protein comprises two antigen-binding polypeptides each comprising a hinge region, wherein one subunit of the dimeric immunostimulatory cytokine or variant thereof is positioned at the hinge region of one antigen-binding polypeptide, and wherein the other subunit of the dimeric immunostimulatory cytokine or variant thereof is positioned at the hinge region of the other antigen-binding polypeptide. In some embodiments, the immunostimulatory cytokine or variant thereof is IL-2 or variant thereof. In some embodiments, the TL-2 variant comprises one or more mutations at a position selected from the group consisting of F24, K35, R38, F42, K43, E61, and P65 relative to a wildtype IL-2. In some embodiments, the IL-2 variant comprises one or more mutations selected from the group consisting of F24A, R38D, K43E, E61R, and P65L relative to a wildtype IL-2. In some embodiments, the IL-2 variant comprises an R38D/K43E/E61R mutation relative to a wildtype IL-2. In some embodiments, the immunostimulatory cytokine or variant thereof is IL-12 or variant thereof. In some embodiments, the IL-12 variant comprises one or more mutations within the p40 subunit at a position selected from the group consisting of E45, Q56, V57, K58, E59, F60, G61, D62, A63, G64, Q65, and C177 relative to a wildtype p40 subunit. In some embodiments, the IL-12 variant comprises one or more mutations within the p40 subunit selected from the group consisting of Q56A, V57A, K58A, E59A, F60A, G61A, D62A, A63S, G64A, and Q65A relative to a wildtype p40 subunit. In some embodiments, the IL-12 variant comprises an E59A/F60A mutation within the p40 subunit relative to a wildtype p40 subunit. In some embodiments, the IL-12 variant comprises an F60A mutation within the p40 subunit relative to a wildtype p40 subunit. In some embodiments, the p40 subunit and the p35 subunit of the IL-12 or variant thereof are connected by a linker. In some embodiments, the two or more first binding domains are the same. In some embodiments, the two or more first binding domains are different. In some embodiments, the second binding domain is an agonist ligand or variant thereof of an inhibitory checkpoint molecule. In some embodiments, the inhibitory checkpoint molecule is selected from the group consisting of PD-1, PD-L1, PD-L2, CTLA-4, LAG-3, TIM-3, HHLA2, CD47, CXCR4, CD160, CD73, BLTA, B7-H4, TIGIT, Siglec7, Siglec9, and VISTA. In some embodiments, the second binding domain is PD-L1 or variant thereof. In some embodiments, the PD-L1 variant has increased binding affinity to PD-1 compared to a wildtype PD-L1. In some embodiments, the PD-L1 variant comprises one or more mutations at a position selected from the group consisting of 154, Y56, E58, R113, M115, S117, and G119 relative to a wildtype PD-L1. In some embodiments, the PD-L1 variant comprises one or more mutations selected from the group consisting of I54Q, Y56F, E58M, R 113T, M115L, S117A, and G119K relative to a wildtype PD-L1. In some embodiments, the PD-L1 variant comprises an I54Q/Y56F/E58M/R113T/M115L/S117A/G119K mutation relative to a wildtype PD-L1. In some embodiments, the second binding domain is PD-L2 or variant thereof. In some embodiments, the PD-L2 variant has increased binding affinity to PD-1 compared to a wildtype PD-L2. In some embodiments, the second binding domain is an agonist antibody or antigen-binding fragment thereof of an inhibitory checkpoint molecule. In some embodiments, the inhibitory checkpoint molecule is selected from the group consisting of PD-1, PD-L1, PD-L2, CTLA-4, LAG-3, TIM-3, HHLA2, CD47, CXCR4, CD160, CD73, BLTA, B7-H4, TIGIT, Siglec7, Siglec9, and VISTA. In some embodiments, the agonist antibody or antigen-binding fragment thereof specifically recognizes PD-1 (“anti-PD-1 agonist antibody or antigen-binding fragment thereof”). In some embodiments, the agonist antibody or antigen-binding fragment thereof is a Fab. In some embodiments, the agonist antibody or antigen-binding fragment thereof is an scFv. In some embodiments, the antigen-binding protein comprises two or more second binding domains. In some embodiments, two or more second binding domains or portions thereof are positioned in tandem at the N-terminus of the antigen-binding polypeptide. In some embodiments, the antigen-binding protein comprises two antigen-binding polypeptides each comprising a hinge region, and wherein only one antigen-binding polypeptide comprises the two or more second binding domains or portions thereof positioned in tandem at the N-terminus of the antigen-binding polypeptide. In some embodiments, the antigen-binding protein comprises two antigen-binding polypeptides each comprising a hinge region, and wherein each antigen-binding polypeptide comprises one or more second binding domains or portions thereof at the N-terminus of each antigen-binding polypeptide. In some embodiments, the antigen-binding protein comprises two antigen-binding polypeptides each comprising a hinge region, wherein the first antigen-binding polypeptide comprises one or more second binding domains or portions thereof at the N-terminus of the first antigen-binding polypeptide, wherein the second antigen-binding polypeptide comprises a third binding domain or portion thereof at the N-terminus of the second antigen-binding polypeptide, and wherein the third binding domain specifically recognizing a third target molecule. In some embodiments, the third binding domain and the second binding domain are the same. In some embodiments, the third binding domain and the second binding domain are different. In some embodiments, the third target molecule and the second target molecule are the same. In some embodiments, the third target molecule and the second target molecule are different.

[0110] In some embodiments, there is provided an immunomodulatory molecule comprising: i) a first antigen-binding polypeptide comprising from N-terminus to C-terminus: a first second binding domain (e.g., PD-L2 or PD-L1 or variant thereof), a second second binding domain (e.g., PD-L2 or PD-L1 or variant thereof), a first binding domain (e.g., a p35 subunit and a p40 subunit of an IL-12 or variant thereof (e.g., E59A/F60A or F60A in p40) connected in tandem) positioned at a first hinge region, and a first subunit of an Fc domain or portion thereof; ii) a second antigen-binding polypeptide comprising from N-terminus to C-terminus: a VH, an optional CH1, a second hinge region, and a second subunit of the Fc domain or portion thereof; and iii) a third antigen-binding polypeptide comprising from N-terminus to C-terminus: a VL, and an optional CL; wherein the VH and the VL and optionally the CH1 and the CL form a third binding domain specifically recognizing a third target molecule, wherein the first binding domain specifically recognizes a first target molecule, wherein the second binding domain specifically recognizes a second target molecule (e.g., PD-1), wherein the first binding domain upon binding to the first target molecule (e.g., IL-12 receptor) up-regulates an immune response, and wherein the first and/or second second binding domain (e.g., PD-L2 or PD-L1 or variant thereof) upon binding to the second target molecule down-regulates the immune response. See, e.g., FIG. 1B. In some embodiments, the third binding domain is an agonist antigen-binding fragment specifically recognizing PD-1. See, e.g., FIG. 1A. In some embodiments, the first and second second binding domains are the same. In some embodiments, the first and second second binding domains are different. In some embodiments, the first and second second binding domain specifically recognize the same epitope. In some embodiments, the first and second second binding domain specifically recognize different epitopes.

[0111] In some embodiments, there is provided an immunomodulatory molecule comprising: i) a first antigen-binding polypeptide comprising from N-terminus to C-terminus: a first VH, an optional first CH1, a first binding domain (e.g., a p35 subunit and a p40 subunit of an IL-12 or variant thereof connected in tandem) positioned at a first hinge region, and a first subunit of an Fc domain or portion thereof; ii) a second antigen-binding polypeptide comprising from N-terminus to C-terminus: a second VH, an optional second CH1, a second hinge region, and a second subunit of the Fc domain or portion thereof; iii) a third antigen-binding polypeptide comprising from N-terminus to C-terminus: a first VL, and an optional first CL; and iv) a fourth antigen-binding polypeptide comprising from N-terminus to C-terminus: a second VL, and an optional second CL, wherein the first VH and the first VL and optionally the first CH1 and the first CL form a second binding domain (e.g., an agonist antigen-binding fragment specifically recognizing PD-1) specifically recognizing a second target molecule, wherein the first binding domain specifically recognizes a first target molecule (e.g., IL-12 receptor), wherein the second VH and the second VL and optionally the second CH1 and the second CL form a third binding domain specifically recognizing a third target molecule, wherein the first binding domain upon binding to the first target molecule (e.g., IL-12 receptor) up-regulates an immune response, and wherein the second binding domain upon binding to the second target molecule (e.g., PD-1) down-regulates the immune response. See, e.g., FIG. 1D. In some embodiments, the third binding domain is an agonist antigen-binding fragment specifically recognizing PD-1. Thus in some embodiments, there is provided an immunomodulatory molecule comprising: i) a first antigen-binding polypeptide comprising from N-terminus to C-terminus: a first VH, an optional first CH1, a p35 subunit and a p40 subunit of an IL-12 or variant thereof positioned in tandem at a first hinge region, and a first subunit of an Fc domain or portion thereof; ii) a second antigen-binding polypeptide comprising from N-terminus to C-terminus: a second VH, an optional second CH1, a second hinge region, and a second subunit of the Fc domain or portion thereof; iii) a third antigen-binding polypeptide comprising from N-terminus to C-terminus: a first VL, and an optional first CL; and iv) a fourth antigen-binding polypeptide comprising from N-terminus to C-terminus: a second VL, and an optional second CL, wherein the first VH and the first VL and optionally the first CH1 and the first CL form the second binding domain which is an agonist antigen-binding fragment specifically recognizing PD-1, and wherein the second VH and the second VL and optionally the second CH1 and the second CL form a third binding domain which is an agonist antigen-binding fragment specifically recognizing PD-1, wherein the IL-12 or variant upon binding to IL-12 receptor up-regulates an immune response, and wherein the second binding domain upon and/or the third binding domain upon binding to PD-1 down-regulates the immune response. See, e.g., FIG. 1C. In some embodiments, the third binding domain and the second binding domain are the same. In some embodiments, the third binding domain and the second binding domain are different. In some embodiments, the third binding domain and the second binding domain specifically recognize the same epitope. In some embodiments, the third binding domain and the second binding domain specifically recognize different epitopes.

[0112] In some embodiments, there is provided an immunomodulatory molecule comprising: i) a first antigen-binding polypeptide comprising from N-terminus to C-terminus: a first second binding domain (e.g., PD-L2 or PD-L1 or variant thereof), a first binding domain (e.g., a p35 subunit and a p40 subunit of an IL-12 or variant thereof connected in tandem) positioned at a first hinge region, and a first subunit of an Fc domain or portion thereof, and ii) a second antigen-binding polypeptide comprising from N-terminus to C-terminus: a second second binding domain (e.g., PD-L2 or PD-L1 or variant thereof), a second hinge region, and a second subunit of an Fc domain or portion thereof, wherein the first binding domain specifically recognizes a first target molecule (e.g., IL-12 receptor), wherein the first binding domain upon binding to the first target molecule (e.g., IL-12 receptor) up-regulates an immune response, and wherein the second binding domain upon binding to the second target molecule (e.g., PD-1) down-regulates the immune response. See, e.g., FIG. 1G. In some embodiments, the first and second second binding domains are the same. In some embodiments, the first and second second binding domains are different. In some embodiments, the first and second second binding domain specifically recognize the same epitope. In some embodiments, the first and second second binding domain specifically recognize different epitopes.

[0113] In some embodiments, there is provided an immunomodulatory molecule comprising: i) i) a first antigen-binding polypeptide comprising from N-terminus to C-terminus: a first second binding domain (e.g., PD-L2 or PD-L1 or variant thereof), a second second binding domain (e.g., PD-L2 or PD-L1 or variant thereof), a first binding domain (e.g., a p35 subunit and a p40 subunit of an IL-12 or variant thereof connected in tandem) positioned at a first hinge region, and a first subunit of an Fc domain or portion thereof; and ii) a second antigen-binding polypeptide comprising from N-terminus to C-terminus: a third second binding domain (e.g., PD-L2 or PD-L1 or variant thereof), a fourth second binding domain (e.g., PD-L2 or PD-L1 or variant thereof), a second hinge region, and a second subunit of the Fc domain or portion thereof, wherein the first binding domain specifically recognizes a first target molecule (e.g., IL-12 receptor), wherein the first, second, third, and/or fourth second binding domain specifically recognizes a second target molecule (e.g., PD-1), wherein the first binding domain upon binding to the first target molecule (e.g., IL-12 receptor) up-regulates an immune response, and wherein the first, second, third, and/or fourth second binding domain upon binding to the second target molecule (e.g., PD-1) down-regulates the immune response. See, e.g., FIG. 1H. In some embodiments, the first, second, third, and/or fourth second binding domains are the same. In some embodiments, the first, second, third, and/or fourth second binding domains are different. In some embodiments, the first, second, third, and/or fourth second binding domain specifically recognize the same epitope. In some embodiments, the first, second, third, and/or fourth second binding domain specifically recognize different epitopes.

[0114] In some embodiments, there is provided an immunomodulatory molecule comprising: i) a first antigen-binding polypeptide comprising from N-terminus to C-terminus: a first second binding domain (e.g., PD-L2 or PD-L1 or variant thereof), a portion of a first binding domain (e.g., a p35 subunit of an IL-12 or variant thereof) positioned at a first hinge region, and a first subunit of an Fc domain or portion thereof; and ii) a second antigen-binding polypeptide comprising from N-terminus to C-terminus: a second second binding domain (e.g., PD-L2 or PD-L1 or variant thereof), another portion of the first binding domain (e.g., a p40 subunit of an IL-12 or variant thereof) positioned at a second hinge region, and a second subunit of the Fc domain or portion thereof, wherein the first binding domain specifically recognizes a first target molecule (e.g., IL-12 receptor), wherein the first and second second binding domain specifically recognize a second target molecule (e.g., PD-1), wherein the first binding domain upon binding to the first target molecule (e.g., IL-12 receptor) up-regulates an immune response, and wherein the first and/or second second binding domain upon binding to the second target molecule (e.g., PD-1) down-regulates the immune response. See, e.g., FIG. 1L. In some embodiments, the first and second second binding domains are the same. In some embodiments, the first and second second binding domains are different. In some embodiments, the first and second second binding domain specifically recognize the same epitope. In some embodiments, the first and second second binding domain specifically recognize different epitopes.

[0115] In some embodiments, there is provided an immunomodulatory molecule comprising: i) a first antigen-binding polypeptide comprising from N-terminus to C-terminus: a portion of a first binding domain (e.g., a p35 subunit or a p40 subunit of an IL-12 or variant thereof) positioned at a first hinge region, and a first subunit of an Fc domain or portion thereof; and ii) a second antigen-binding polypeptide comprising from N-terminus to C-terminus: a first second binding domain (e.g., PD-L2 or PD-L1 or variant thereof), a second second binding domain (e.g., PD-L2 or PD-L1 or variant thereof), another portion of a first binding domain (e.g., a p40 subunit or a p35 subunit of an IL-12 or variant thereof) positioned at a second hinge region, and a second subunit of the Fc domain or portion thereof, wherein the first binding domain specifically recognizes a first target molecule (e.g., IL-12 receptor), wherein the first and second second binding domain specifically recognize a second target molecule (e.g., PD-1), wherein the first binding domain upon binding to the first target molecule (e.g., IL-12 receptor) up-regulates an immune response, and wherein the first and/or second second binding domain upon binding to the second target molecule (e.g., PD-1) down-regulates the immune response. See, e.g., FIG. 1M. In some embodiments, the first and second second binding domains are the same. In some embodiments, the first and second second binding domains are different. In some embodiments, the first and second second binding domain specifically recognize the same epitope. In some embodiments, the first and second second binding domain specifically recognize different epitopes.

[0116] In some embodiments, there is provided an immunomodulatory molecule comprising: i) a first antigen-binding polypeptide comprising from N-terminus to C-terminus: a first VH, an optional first CH1, a portion of a first binding domain (e.g., a p35 subunit or a p40 subunit of an IL-12 or variant thereof) positioned at a first hinge region, and a first subunit of an Fc domain or portion thereof; ii) a second antigen-binding polypeptide comprising from N-terminus to C-terminus: a second VH, an optional second CH1, another portion of the first binding domain (e.g., a p40 subunit or a p35 subunit of an IL-12 or variant thereof) positioned at a second hinge region, and a second subunit of the Fc domain or portion thereof; iii) a third antigen-binding polypeptide comprising from N-terminus to C-terminus: a first VL, and an optional first CL; and iv) a fourth antigen-binding polypeptide comprising from N-terminus to C-terminus: a second VL, and an optional second CL, wherein the first VH and the first VL and optionally the first CH1 and the first CL form the second binding domain specifically recognizes a second target molecule (e.g., an agonist antigen-binding fragment specifically recognizing PD-1), wherein the second VH and the second VL and optionally the second CH1 and the second CL form a third binding domain specifically recognizing a third target molecule, wherein the first binding domain specifically recognizes a first target molecule (e.g., IL-12 receptor), wherein the first binding domain upon binding to the first target molecule (e.g., IL-12 receptor) up-regulates an immune response, and wherein the second binding domain upon binding to the second target molecule (e.g., PD-1) down-regulates the immune response. See, e.g., FIG. 1O. In some embodiments, the third binding domain is an agonist antigen-binding fragment specifically recognizing PD-1. See, e.g., FIG. 1N. In some embodiments, the third binding domain and the second binding domain are the same. In some embodiments, the third binding domain and the second binding domain are different. In some embodiments, the third binding domain and the second binding domain specifically recognize the same epitope. In some embodiments, the third binding domain and the second binding domain specifically recognize different epitopes.

[0117] In some embodiments, the immunomodulatory molecule comprises an antigen-binding protein comprising an antigen-binding polypeptide, wherein the antigen-binding polypeptide comprises from N′ to C′: the first binding domain or portion thereof, the second binding domain or portion thereof, an optional hinge region, and an Fc domain subunit or portion thereof. Thus in some embodiments, there is provided an immunomodulatory molecule comprising an antigen-binding protein comprising an antigen-binding polypeptide, wherein the antigen-binding polypeptide comprises from N′ to C′: the first binding domain or portion thereof (e.g., immunostimulatory cytokine such as IL-2 or IL-12 or variant thereof), the second binding domain or portion thereof (e.g., agonist ligand such as PD-L1 or PD-L2 or variant thereof, or agonist antigen-binding fragment such as anti-PD-1 agonist Fab, scFv, VHH), an optional hinge region, and an Fc domain subunit or portion thereof, wherein the first binding domain specifically recognizes a first target molecule (e.g., IL-12 receptor), wherein the second binding domain specifically recognizes a second target molecule (e.g., PD-1), wherein the first binding domain upon binding to the first target molecule (e.g., IL-12 receptor) up-regulates an immune response, and wherein the second binding domain upon binding to the second target molecule (e.g., PD-1) down-regulates the immune response. In some embodiments, the second binding domain is an agonist Fab or an agonist scFv that specifically recognizes an inhibitory checkpoint molecule. In some embodiments, the second binding domain is an agonist ligand or variant thereof of an inhibitory checkpoint molecule. In some embodiments, the second binding domain is PD-L1 or PD-L2 or variant thereof. In some embodiments, the first binding domain is an immunostimulatory cytokine or variant thereof. In some embodiments, the immunostimulatory cytokine or variant thereof is IL-2 or IL-12 or variant thereof. In some embodiments, wherein the antigen-binding protein comprises two antigen-binding polypeptides each comprising a hinge region, wherein the first antigen-binding polypeptide comprises from N′ to C′: the first binding domain or portion thereof, the second binding domain or portion thereof, a first hinge region, and a first subunit of an Fc domain or portion thereof; wherein the second antigen-binding polypeptide comprises from N′ to C′: a third binding domain or portion thereof, a second hinge region, and a second subunit of the Fc domain or portion thereof; and wherein the third binding domain specifically recognizing a third target molecule. In some embodiments, the third binding domain and the second binding domain are the same. In some embodiments, the third binding domain and the second binding domain are different. In some embodiments, the third target molecule and the second target molecule are the same. In some embodiments, the third target molecule and the second target molecule are different.

[0118] In some embodiments, there is provided an immunomodulatory molecule comprising: i) a first antigen-binding polypeptide comprising from N-terminus to C-terminus: a first binding domain (e.g., a p35 subunit and a p40 subunit of an IL-12 or variant thereof fused in tandem) specifically recognizing a first target molecule, a first VH, an optional first CH1, a first hinge region, and a first subunit of an Fc domain or portion thereof; ii) a second antigen-binding polypeptide comprising from N-terminus to C-terminus: a second VH, an optional second CH1, a second hinge region, and a second subunit of the Fc domain or portion thereof; iii) a third antigen-binding polypeptide comprising from N-terminus to C-terminus: a first VL, and an optional first CL; and iv) a fourth antigen-binding polypeptide comprising from N-terminus to C-terminus: a second VL, and an optional second CL, wherein the first VH and the first VL and optionally the first CH1 and the first CL form a second binding domain specifically recognizing a second target molecule (e.g., an agonist antigen-binding fragment specifically recognizing PD-1), wherein the second VH and the second VL and optionally the second CH1 and the second CL form a third binding domain specifically recognizing a third target molecule, wherein the first binding domain upon binding to the first target molecule (e.g., IL-12 receptor) up-regulates an immune response, and wherein the second binding domain upon binding to the second target molecule (e.g., PD-1) down-regulates the immune response. In some embodiments, the third binding domain is an agonist antigen-binding fragment specifically recognizing PD-1. See, e.g., FIG. 1T. In some embodiments, the third binding domain and the second binding domain are the same. In some embodiments, the third binding domain and the second binding domain are different. In some embodiments, the third target molecule and the second target molecule are the same. In some embodiments, the third target molecule and the second target molecule are different.

[0119] In some embodiments, there is provided an immunomodulatory molecule comprising: i) a first antigen-binding polypeptide comprising from N-terminus to C-terminus: a first binding domain (e.g., a p35 subunit and a p40 subunit of an IL-12 or variant thereof fused in tandem) specifically recognizing a first target molecule, a first second binding domain (e.g., PD-L2 or PD-L1 or variant thereof), a second second binding domain (e.g., PD-L2 or PD-L1 or variant thereof), a first hinge region, and a first subunit of an Fc domain or portion thereof; and ii) a second antigen-binding polypeptide comprising from N-terminus to C-terminus: a third second binding domain (e.g., PD-L2 or PD-L1 or variant thereof), a fourth second binding domain (e.g., PD-L2 or PD-L1 or variant thereof), a second hinge region, and a second subunit of the Fc domain or portion thereof, wherein the first, second, third, and/or fourth second binding domain specifically recognizes a second target molecule (e.g., PD-1), wherein the first binding domain upon binding to the first target molecule (e.g., IL-12 receptor) up-regulates an immune response, and wherein the first, second, third, and/or fourth second binding domain upon binding to the second target molecule (e.g., PD-1) down-regulates the immune response. See, e.g., FIG. 1U. In some embodiments, the first, second, third, and/or fourth second binding domains are the same. In some embodiments, the first, second, third, and/or fourth second binding domains are different. In some embodiments, the first, second, third, and/or fourth second binding domain specifically recognize the same epitope. In some embodiments, the first, second, third, and/or fourth second binding domain specifically recognize different epitopes.

[0120] In some embodiments, there is provided an immunomodulatory molecule comprising: i) a first antigen-binding polypeptide comprising from N-terminus to C-terminus: a first binding domain (e.g., a p35 subunit and a p40 subunit of an IL-12 or variant thereof fused in tandem) specifically recognizing a first target molecule, a first second binding domain (e.g., PD-L2 or PD-L1 or variant thereof), a second second binding domain (e.g., PD-L2 or PD-L1 or variant thereof), a first hinge region, and a first subunit of an Fc domain or portion thereof; ii) a second antigen-binding polypeptide comprising from N-terminus to C-terminus: a VH, an optional CH1, a second hinge region, and a second subunit of the Fc domain or portion thereof; and iii) a third antigen-binding polypeptide comprising from N-terminus to C-terminus: a VL, and an optional CL, wherein the VH and the VL and optionally the CH1 and the CL form a third binding domain specifically recognizing a third target molecule, wherein the first and/or second second binding domain specifically recognizes a second target molecule (e.g., PD-1), wherein the first binding domain upon binding to the first target molecule (e.g., IL-12 receptor) up-regulates an immune response, and wherein the first and/or second second binding domain upon binding to the second target molecule (e.g., PD-1) down-regulates the immune response. In some embodiments, the third binding domain is an agonist antigen-binding fragment specifically recognizing PD-1. See, e.g., FIG. 1V. In some embodiments, the first and second second binding domains are the same. In some embodiments, the first and second second binding domains are different. In some embodiments, the first and second second binding domain specifically recognize the same epitope. In some embodiments, the first and second second binding domain specifically recognize different epitopes.

[0121] In some embodiments, there is provided an immunomodulatory molecule comprising: i) a first antigen-binding polypeptide comprising from N-terminus to C-terminus: a first binding domain (e.g., a p35 subunit and a p40 subunit of an IL-12 or variant thereof fused in tandem) specifically recognizing a first target molecule, a V_{H}, an optional CH1, a first hinge region, and a first subunit of an Fc domain or portion thereof; ii) a second antigen-binding polypeptide comprising from N-terminus to C-terminus: a first third binding domain (e.g., PD-L2 or PD-L1 or variant thereof), a second third binding domain (e.g., PD-L2 or PD-L1 or variant thereof), a second hinge region, and a second subunit of the Fc domain or portion thereof; and iii) a third antigen-binding polypeptide comprising from N-terminus to C-terminus: a V_{L}, and an optional C_{L}, wherein the V_{H} and the V_{L} and optionally the CH1 and the C_{L} form a second binding domain specifically recognizing a second target molecule (e.g., an agonist antigen-binding fragment specifically recognizing PD-1), wherein the first and/or second third binding domain specifically recognizes a third target molecule (e.g., PD-1), wherein the first binding domain upon binding to the first target molecule (e.g., IL-12 receptor) up-regulates an immune response, and wherein the second binding domain upon binding to the second target molecule (e.g., PD-1) down-regulates the immune response. See, e.g., FIG. 1W. In some embodiments, the first and second third binding domains are the same. In some embodiments, the first and second third binding domains are different. In some embodiments, the first and second third binding domain specifically recognize the same epitope. In some embodiments, the first and second third binding domain specifically recognize different epitopes.

[0122] In some embodiments, there is provided an immunomodulatory molecule comprising: i) a first antigen-binding polypeptide comprising from N-terminus to C-terminus: a first VH, an optional first CH1, a first hinge region, and a first subunit of an Fc domain or portion thereof; ii) a second antigen-binding polypeptide comprising from N-terminus to C-terminus: a second VH, an optional second CH1, a second hinge region, and a second subunit of the Fc domain or portion thereof; iii) a third antigen-binding polypeptide comprising from N-terminus to C-terminus: a first binding domain (e.g., a p35 subunit and a p40 subunit of an IL-12 or variant thereof fused in tandem) specifically recognizes a first target molecule, a first VL, and an optional first CL; and iv) a fourth antigen-binding polypeptide comprising from N-terminus to C-terminus: a second VL, and an optional second CL, wherein the first VH and the first VL and optionally the first CH1 and the first CL form a second binding domain specifically recognizes a second target molecule (e.g., an agonist antigen-binding fragment specifically recognizing PD-1), and wherein the second VH and the second VL and optionally the second CH1 and the second CL form a third binding domain specifically recognizing a third target molecule, wherein the first binding domain upon binding to the first target molecule (e.g., IL-12 receptor) up-regulates an immune response, and wherein the second binding domain upon binding to the second target molecule (e.g., PD-1) down-regulates the immune response. In some embodiments, the third binding domain is an agonist antigen-binding fragment specifically recognizing PD-1. In some embodiments, the third binding domain and the second binding domain are the same. In some embodiments, the third binding domain and the second binding domain are different. In some embodiments, the third target molecule and the second target molecule are the same. In some embodiments, the third target molecule and the second target molecule are different.

[0123] In some embodiments, there is provided an immunomodulatory molecule comprising: i) a first antigen-binding polypeptide comprising from N-terminus to C-terminus: a VH, an optional CH1, a first hinge region, and a first subunit of an Fc domain or portion thereof; ii) a second antigen-binding polypeptide comprising from N-terminus to C-terminus: a first third binding domain (e.g., PD-L2 or PD-L1 or variant thereof), a second third binding domain (e.g., PD-L2 or PD-L1 or variant thereof), a second hinge region, and a second subunit of the Fc domain or portion thereof; and iii) a third antigen-binding polypeptide comprising from N-terminus to C-terminus: a first binding domain (e.g., a p35 subunit and a p40 subunit of an IL-12 or variant thereof fused in tandem) specifically recognizing a first target molecule, a VL, and an optional CL, wherein the VH and the VL and optionally the CH1 and the CL form a second binding domain specifically recognizing a second target molecule (e.g., an agonist antigen-binding fragment specifically recognizing PD-1), wherein the first and/or second third binding domain specifically recognizes a third target molecule (e.g., PD-1), wherein the first binding domain upon binding to the first target molecule (e.g., IL-12 receptor) up-regulates an immune response, and wherein the second binding domain upon binding to the second target molecule (e.g., PD-1) down-regulates the immune response. In some embodiments, the first and second third binding domains are the same. In some embodiments, the first and second third binding domains are different. In some embodiments, the first and second third binding domain specifically recognize the same epitope. In some embodiments, the first and second third binding domain specifically recognize different epitopes.

[0124] In some embodiments, the immunomodulatory molecule comprises an antigen-binding protein comprising a first antigen-binding polypeptide and a second antigen-binding polypeptide, wherein the first antigen-binding polypeptide comprises from N-terminus to C-terminus: the second antigen binding domain or portion thereof, a first hinge domain, and a first subunit of an Fc domain or portion thereof; wherein the second antigen-binding polypeptide comprises from N-terminus to C-terminus: the first antigen binding domain or portion thereof, a second hinge domain, and a second subunit of the Fc domain or portion thereof. Thus in some embodiments, there is provided an immunomodulatory molecule comprising an antigen-binding protein comprising a first antigen-binding polypeptide and a second antigen-binding polypeptide, wherein the first antigen-binding polypeptide comprises from N-terminus to C-terminus: the second antigen binding domain or portion thereof, a first hinge domain, and a first subunit of an Fc domain or portion thereof; wherein the second antigen-binding polypeptide comprises from N-terminus to C-terminus: the first antigen binding domain or portion thereof, a second hinge domain, and a second subunit of the Fc domain or portion thereof, wherein the first binding domain specifically recognizes a first target molecule, wherein the second binding domain specifically recognizes a second target molecule, wherein the first binding domain upon binding to the first target molecule (e.g., IL-12 receptor) up-regulates an immune response, and wherein the second binding domain upon binding to the second target molecule (e.g., PD-1) down-regulates the immune response. In some embodiments, the second binding domain is an agonist Fab or an agonist scFv that specifically recognizes an inhibitory checkpoint molecule. In some embodiments, the second binding domain is an agonist ligand or variant thereof of an inhibitory checkpoint molecule. In some embodiments, the second binding domain is PD-L1 or PD-L2 or variant thereof. In some embodiments, the first binding domain is an immunostimulatory cytokine or variant thereof. In some embodiments, the immunostimulatory cytokine or variant thereof is IL-2 or IL-12 or variant thereof.

[0125] In some embodiments, there is provided an immunomodulatory molecule comprising: i) a first antigen-binding polypeptide comprising from N-terminus to C-terminus: a VH, an optional CH1, a first hinge region, and a first subunit of an Fc domain or portion thereof; ii) a second antigen-binding polypeptide comprising from N-terminus to C-terminus: a first binding domain (e.g., a p35 subunit and a p40 subunit of an IL-12 or variant thereof fused in tandem) specifically recognizes a first target molecule, a second hinge region, and a second subunit of the Fc domain or portion thereof; and iii) a third antigen-binding polypeptide comprising from N-terminus to C-terminus: a VL, and an optional CL, wherein the VH and the VL and optionally the CH1 and the CL form a second binding domain specifically recognizing a second target molecule (e.g., an agonist antigen-binding fragment specifically recognizing PD-1), wherein the first binding domain upon binding to the first target molecule (e.g., IL-12 receptor) up-regulates an immune response, and wherein the second binding domain upon binding to the second target molecule (e.g., PD-1) down-regulates the immune response. See, e.g., FIG. 1F.

[0126] In some embodiments, there is provided an immunomodulatory molecule comprising: i) a first antigen-binding polypeptide comprising from N-terminus to C-terminus: a first second binding domain (e.g., PD-L2 or PD-L1 or variant thereof), a second second binding domain (e.g., PD-L2 or PD-L1 or variant thereof), a first hinge region, and a first subunit of an Fc domain or portion thereof; and ii) a second antigen-binding polypeptide comprising from N-terminus to C-terminus: a first binding domain (e.g., a p35 subunit and a p40 subunit of an IL-12 or variant thereof fused in tandem) specifically recognizing a first target molecule, a second hinge region, and a second subunit of the Fc domain or portion thereof, wherein the first and/or second second binding domain specifically recognizes a second target molecule (e.g., PD-1), wherein the first binding domain upon binding to the first target molecule (e.g., IL-12 receptor) up-regulates an immune response, and wherein the first and/or second second binding domain upon binding to the second target molecule (e.g., PD-1) down-regulates the immune response. See, e.g., FIG. 1E. In some embodiments, the first and second second binding domains are the same. In some embodiments, the first and second second binding domains are different. In some embodiments, the first and second second binding domain specifically recognize the same epitope. In some embodiments, the first and second second binding domain specifically recognize different epitopes.

[0127] In some embodiments, the immunomodulatory molecule comprises an antigen-binding protein comprising an antigen-binding polypeptide, wherein the antigen-binding polypeptide comprises from N-terminus to C-terminus: the second binding domain or portion thereof, an optional hinge region, an Fc domain subunit or portion thereof, and the first binding domain or portion thereof. Thus in some embodiments, there is provided an immunomodulatory molecule comprising an antigen-binding protein comprising an antigen-binding polypeptide, wherein the antigen-binding polypeptide comprises from N-terminus to C-terminus: a second binding domain or portion thereof, an optional hinge region, an Fc domain subunit or portion thereof, and a first binding domain or portion thereof, wherein the first binding domain specifically recognizes a first target molecule, wherein the second binding domain specifically recognizes a second target molecule (e.g., PD-1), wherein the first binding domain upon binding to the first target molecule (e.g., IL-12 receptor) up-regulates an immune response, and wherein the second binding domain upon binding to the second target molecule (e.g., PD-1) down-regulates the immune response. In some embodiments, the second binding domain is an agonist Fab or an agonist scFv that specifically recognizes an inhibitory checkpoint molecule. In some embodiments, the second binding domain is an agonist ligand or variant thereof of an inhibitory checkpoint molecule. In some embodiments, the second binding domain is PD-L1 or PD-L2 or variant thereof. In some embodiments, the first binding domain is an immunostimulatory cytokine or variant thereof. In some embodiments, the immunostimulatory cytokine or variant thereof is IL-2 or IL-12 or variant thereof. In some embodiments, the immunostimulatory cytokine or variant thereof is a monomeric immunostimulatory cytokine or variant thereof. In some embodiments, the immunostimulatory cytokine or variant thereof is a dimeric immunostimulatory cytokine or variant thereof. In some embodiments, both subunits of the dimeric immunostimulatory cytokine or variant thereof are positioned in tandem at the C-terminus of the antigen-binding polypeptide. In some embodiments, the antigen-binding protein comprises two antigen-binding polypeptides each comprising a hinge region and an Fc domain subunit or portion thereof, wherein one subunit of the dimeric immunostimulatory cytokine or variant thereof is fused to the C-terminus of the Fc domain subunit or portion thereof of one antigen-binding polypeptide, and wherein the other subunit of the dimeric immunostimulatory cytokine or variant thereof is fused to the C-terminus of the Fc domain subunit or portion thereof of the other antigen-binding polypeptide. In some embodiments, wherein the antigen-binding polypeptide not comprising the second binding domain or portion thereof comprises from N-terminus to C-terminus: a third binding domain or portion thereof specifically recognizing a third target molecule, the hinge region, the subunit of the Fc domain or portion thereof, and the subunit of the dimeric immunostimulatory cytokine or variant thereof. In some embodiments, the antigen-binding protein comprises a first antigen-binding polypeptide and a second antigen-binding polypeptide, wherein the first antigen-binding polypeptide comprises from N-terminus to C-terminus: the second binding domain or portion thereof, a first hinge region, a first subunit of an Fc domain or portion thereof, and the first binding domain or portion thereof; wherein the second antigen-binding polypeptide comprises from N′ to C′: a third binding domain or portion thereof specifically recognizing a third target molecule, a second hinge region, and a second subunit of the Fc domain or portion thereof. In some embodiments, the third binding domain and the second binding domain are the same. In some embodiments, the third binding domain and the second binding domain are different. In some embodiments, the third target molecule and the second target molecule are the same. In some embodiments, the third target molecule and the second target molecule are different.

[0128] In some embodiments, there is provided an immunomodulatory molecule comprising: i) a first antigen-binding polypeptide comprising from N-terminus to C-terminus: a first second binding domain (e.g., PD-L2 or PD-L1 or variant thereof), a first hinge region, a first subunit of an Fc domain or portion thereof, and a first binding domain (e.g., a p35 subunit and a p40 subunit of an IL-12 or variant thereof fused in tandem) specifically recognizing a first target molecule; and ii) a second antigen-binding polypeptide comprising from N-terminus to C-terminus; a second second binding domain (e.g., PD-L2 or PD-L1 or variant thereof), a second hinge region, and a second subunit of the Fc domain or portion thereof, wherein the first and/or second second binding domain specifically recognizes a second target molecule (e.g., PD-1), wherein the first binding domain upon binding to the first target molecule (e.g., IL-12 receptor) up-regulates an immune response, and wherein the first and/or second second binding domain upon binding to the second target molecule (e.g., PD-1) down-regulates the immune response. See, e.g., FIG. 11.

[0129] In some embodiments, there is provided an immunomodulatory molecule comprising: i) a first antigen-binding polypeptide comprising from N-terminus to C-terminus: a first VH, an optional first CH1, a first hinge region, a first subunit of an Fc domain or portion thereof, and a first binding domain (e.g., a p35 subunit and a p40 subunit of an IL-12 or variant thereof fused in tandem) specifically recognizing a first target molecule; ii) a second antigen-binding polypeptide comprising from N-terminus to C-terminus: a second VH, an optional second CH1, a second hinge region, and a second subunit of the Fc domain or portion thereof; iii) a third antigen-binding polypeptide comprising from N-terminus to C-terminus: a first VL, and an optional first CL; and iv) a fourth antigen-binding polypeptide comprising from N-terminus to C-terminus: a second VL, and an optional second CL, wherein the first VH and the first VL and optionally the first CH1 and the first CL form a second binding domain specifically recognizing a second target molecule (e.g., an agonist antigen-binding fragment specifically recognizing PD-1), wherein the second VH and the second VL and optionally the second CH1 and the second CL form a third binding domain specifically recognizing a third target molecule, wherein the first binding domain upon binding to the first target molecule (e.g., IL-12 receptor) up-regulates an immune response, and wherein the second second binding domain upon binding to the second target molecule (e.g., PD-1) down-regulates the immune response. In some embodiments, the third binding domain is an agonist antigen-binding fragment specifically recognizing PD-1. See, e.g., FIG. 1J. In some embodiments, the third binding domain and the second binding domain are the same. In some embodiments, the third binding domain and the second binding domain are different. In some embodiments, the third target molecule and the second target molecule are the same. In some embodiments, the third target molecule and the second target molecule are different.

[0130] In some embodiments, there is provided an immunomodulatory molecule comprising: i) a first antigen-binding polypeptide comprising from N-terminus to C-terminus: a VH, an optional CH1, a first hinge region, a first subunit of an Fc domain or portion thereof, and a first binding domain (e.g., a p35 subunit and a p40 subunit of an IL-12 or variant thereof fused in tandem) specifically recognizing a first target molecule; ii) a second antigen-binding polypeptide comprising from N-terminus to C-terminus: a first third binding domain (e.g., PD-L2 or PD-L1 or variant thereof), a second third binding domain (e.g., PD-L2 or PD-L1 or variant thereof), a second hinge region, and a second subunit of the Fc domain or portion thereof; and iii) a third antigen-binding polypeptide comprising from N-terminus to C-terminus: a VL, and an optional CL, wherein the VH and the VL and optionally the CH1 and the CL form a second binding domain specifically recognizing a second target molecule (e.g., an agonist antigen-binding fragment specifically recognizing PD-1), wherein the first binding domain upon binding to the first target molecule (e.g., IL-12 receptor) up-regulates an immune response, and wherein the second second binding domain upon binding to the second target molecule (e.g., PD-1) down-regulates the immune response. See, e.g., FIG. 1K. In some embodiments, the first and second third binding domains are the same. In some embodiments, the first and second third binding domains are different. In some embodiments, the first and second third binding domain specifically recognize the same epitope. In some embodiments, the first and second third binding domain specifically recognize different epitopes.

[0131] In some embodiments, there is provided an immunomodulatory molecule comprising: i) a first antigen-binding polypeptide comprising from N-terminus to C-terminus: a first second binding domain (e.g., PD-L2 or PD-L1 or variant thereof), a first hinge region, a first subunit of an Fc domain or portion thereof, and a portion of a first binding domain (e.g., a p35 subunit or a p40 subunit of an IL-12 or variant thereof); and ii) a second antigen-binding polypeptide comprising from N-terminus to C-terminus; a second second binding domain (e.g., PD-L2 or PD-L1 or variant thereof), a second hinge region, and a second subunit of the Fc domain or portion thereof, and another portion of the first binding domain (e.g., a p40 subunit or a p35 subunit of an IL-12 or variant thereof), wherein the first binding domain specifically recognizes a first target molecule (e.g., IL-12 receptor), wherein the first and/or second second binding domain specifically recognizes a second target molecule, wherein the first binding domain upon binding to the first target molecule (e.g., IL-12 receptor) up-regulates an immune response, and wherein the first and/or second second second binding domain upon binding to the second target molecule (e.g., PD-1) down-regulates the immune response. See, e.g., FIG. 1P. In some embodiments, the first and second second binding domains are the same. In some embodiments, the first and second second binding domains are different. In some embodiments, the first and second second binding domain specifically recognize the same epitope. In some embodiments, the first and second second binding domain specifically recognize different epitopes.

[0132] In some embodiments, there is provided an immunomodulatory molecule comprising: i) a first antigen-binding polypeptide comprising from N-terminus to C-terminus: a first VH, an optional first CH1, a first hinge region, a first subunit of an Fc domain or portion thereof, and a portion of a first binding domain (e.g., a p35 subunit or a p40 subunit of an IL-12 or variant thereof); ii) a second antigen-binding polypeptide comprising from N-terminus to C-terminus: a second VH, an optional second CH1, a second hinge region, a second subunit of the Fc domain or portion thereof, and another portion of the first binding domain (e.g., a p40 subunit or a p35 subunit of an IL-12 or variant thereof); iii) a third antigen-binding polypeptide comprising from N-terminus to C-terminus: a first VL, and an optional first CL; and iv) a fourth antigen-binding polypeptide comprising from N-terminus to C-terminus: a second VL, and an optional second CL, wherein the first VH and the first VL and optionally the first CH1 and the first CL form a second binding domain specifically recognizing a second target molecule (e.g., an agonist antigen-binding fragment specifically recognizing PD-1), and wherein the second VH and the second VL and optionally the second CH1 and the second CL form a third binding domain specifically recognizing a third target molecule, wherein the first binding domain specifically recognizes a first target molecule (e.g., IL-12 receptor), wherein the first binding domain upon binding to the first target molecule (e.g., IL-12 receptor) up-regulates an immune response, and wherein the first and/or second second second binding domain upon binding to the second target molecule (e.g., PD-1) down-regulates the immune response. See, e.g., FIG. 1R. In some embodiments, the third binding domain is an agonist antigen-binding fragment specifically recognizing PD-1. See, e.g., FIG. 1Q. In some embodiments, the third binding domain and the second binding domain are the same. In some embodiments, the third binding domain and the second binding domain are different. In some embodiments, the third target molecule and the second target molecule are the same. In some embodiments, the third target molecule and the second target molecule are different.

[0133] In some embodiments, the immunomodulatory molecule comprises an antigen-binding protein comprising a first antigen-binding polypeptide and a second antigen-binding polypeptide, wherein the first antigen-binding polypeptide comprises from N-terminus to C-terminus: a VH, a CH1, an optional hinge region, an Fc domain subunit or portion thereof; wherein the second antigen-binding polypeptide comprises from N-terminus to C-terminus: a VL, a CL, and the first binding domain or portion thereof; and wherein the VH and the VL and optionally the CH1 and the CL form the second binding domain. Thus in some embodiments, there is provided an immunomodulatory molecule comprising: i) a first antigen-binding polypeptide and a second antigen-binding polypeptide, wherein the first antigen-binding polypeptide comprises from N-terminus to C-terminus: a VH, a CH1, an optional hinge region, an Fc domain subunit or portion thereof; wherein the second antigen-binding polypeptide comprises from N-terminus to C-terminus: a VL, a CL, and a first binding domain or portion thereof; and wherein the VH and the VL and optionally the CH1 and the CL form a second binding domain specifically recognizes a second target molecule, wherein the first binding domain specifically recognizes a first target molecule (e.g., IL-12 receptor), wherein the first binding domain upon binding to the first target molecule (e.g., IL-12 receptor) up-regulates an immune response, and wherein the second binding domain upon binding to the second target molecule (e.g., PD-1) down-regulates the immune response. In some embodiments, the first antigen-binding polypeptide comprises from N-terminus to C-terminus: a VH, a CH1, a first hinge region, a first subunit of an Fc domain or portion thereof; wherein the antigen-binding protein further comprises a third antigen-binding polypeptide comprising from N-terminus to C-terminus: a third binding domain or portion thereof specifically recognizing a third target molecule, a second hinge region, and a second subunit of the Fc domain or portion thereof. In some embodiments, the third binding domain and the second binding domain are the same. In some embodiments, the third binding domain and the second binding domain are different. In some embodiments, the third target molecule and the second target molecule are the same. In some embodiments, the third target molecule and the second target molecule are different. In some embodiments, the immunomodulatory molecule comprises an antigen-binding protein comprising four antigen-binding polypeptides, wherein the first antigen-binding polypeptide comprises from N-terminus to C-terminus: a first VH, a first CH1, a first hinge region, a first subunit of an Fc domain or portion thereof; wherein the second antigen-binding polypeptide comprises from N-terminus to C-terminus: a first VL, a first CL, and the first binding domain or portion thereof, wherein the third antigen-binding polypeptide comprising from N-terminus to C-terminus: a second VH, a second CH1, a second hinge region, and a second subunit of the Fc domain or portion thereof; wherein the fourth antigen-binding polypeptide comprises from N-terminus to C-terminus: a second VL, and a second CL; wherein the first VH and the first VL and the first CH1 and the first CL form the second binding domain; and wherein the second VH and the second VL and the second CH1 and the second CL form a third binding domain specifically recognizing a third target molecule. In some embodiments, the first binding domain is an immunostimulatory cytokine or variant thereof. In some embodiments, the immunostimulatory cytokine or variant thereof is IL-2 or IL-12 or variant thereof. In some embodiments, the immunostimulatory cytokine or variant thereof is a monomeric immunostimulatory cytokine or variant thereof. In some embodiments, the immunostimulatory cytokine or variant thereof is a dimeric immunostimulatory cytokine or variant thereof. In some embodiments, the dimeric immunostimulatory cytokine or variant thereof are positioned in tandem at the C-terminus of the second antigen-binding polypeptide and/or the fourth antigen-binding polypeptide. In some embodiments, one subunit of the dimeric immunostimulatory cytokine or variant thereof is fused to the C-terminus of the first CL of the second antigen-binding polypeptide, and wherein the other subunit of the dimeric immunostimulatory cytokine or variant thereof is fused to the second CL of the fourth antigen-binding polypeptide.

[0134] In some embodiments, there is provided an immunomodulatory molecule comprising: i) a first antigen-binding polypeptide comprising from N-terminus to C-terminus: a first VH, a first CH1, a first hinge region, and a first subunit of an Fc domain or portion thereof; ii) a second antigen-binding polypeptide comprising from N-terminus to C-terminus: a first VL, a first CL, and a first first binding domain (e.g., a p35 subunit and a p40 subunit of an IL-12 or variant thereof fused in tandem); iii) a third antigen-binding polypeptide comprising from N-terminus to C-terminus: a second VH, a second CH1, a second hinge region, and a second subunit of the Fc domain or portion thereof; and iv) a fourth antigen-binding polypeptide comprising from N-terminus to C-terminus: a second VL, a second CL, and a second first binding domain (e.g., a p35 subunit and a p40 subunit of an IL-12 or variant thereof fused in tandem); wherein the first VH and the first VL and the first CH1 and the first CL form a second binding domain specifically recognizing a second target molecule (e.g., an agonist antigen-binding fragment specifically recognizing PD-1), and wherein the second VH and the second VL and the second CH1 and the second CL form a third binding domain specifically recognizing a third target molecule, wherein the first and/or second first binding domain specifically recognizes a first target molecule (e.g., IL-12 receptor), wherein the first and/or second first binding domain upon binding to the first target molecule (e.g., IL-12 receptor) up-regulates an immune response, and wherein the second binding domain upon binding to the second target molecule (e.g., PD-1) down-regulates the immune response. In some embodiments, the third binding domain is an agonist antigen-binding fragment specifically recognizing PD-1. See, e.g., FIG. 1S. In some embodiments, the third binding domain and the second binding domain are the same. In some embodiments, the third binding domain and the second binding domain are different. In some embodiments, the third target molecule and the second target molecule are the same. In some embodiments, the third target molecule and the second target molecule are different. In some embodiments, the first and second first binding domains are the same. In some embodiments, the first and second first binding domains are different. In some embodiments, the first and second first binding domains specifically recognize the same epitope. In some embodiments, the first and second first binding domains specifically recognize different epitopes.

[0135] In some embodiments, there is provided an immunomodulatory molecule comprising: i) a first antigen-binding polypeptide comprising from N-terminus to C-terminus: a second binding domain, a first first binding domain, a first hinge region, a first subunit of an Fc domain or portion thereof, and a second first binding domain (e.g., a p35 subunit and a p40 subunit of an IL-12 or variant thereof connected in tandem; and ii) a second antigen-binding polypeptide comprising from N-terminus to C-terminus: a third binding domain, optionally a third first binding domain, a second hinge region, and a second subunit of the Fc domain or portion thereof, wherein the first first binding domain specifically recognizes a first target molecule, wherein the second first binding domain specifically recognizes a second target molecule (e.g., IL-12 receptor), wherein the second binding domain specifically recognizes a third target molecule, wherein the third binding domain specifically recognizes a fourth target molecule, optionally wherein the optional third first binding domain recognizes a fifth target molecule, wherein the first first binding domain upon binding to the first target molecule up-regulates an immune response, wherein the second first binding domain upon binding to the second target molecule up-regulates an immune response, wherein the second binding domain upon binding to the third target molecule down-regulates the immune response, wherein the third binding domain upon binding to the fourth target molecule localize the immunomodulatory molecule to a tumor microenvironment, and optionally wherein the third first binding domain upon binding to the fifth target molecule up-regulates an immune response. See, e.g., FIG. 11A-11B. In some embodiments, the first, second, and/or third first binding domains are different. In some embodiments, the first, second, and/or third first binding domain specifically recognize the same epitope. In some embodiments, the first, second, and/or third first binding domain specifically recognize different epitopes.

[0136] In some embodiments, there is provided an immunomodulatory molecule comprising: i) a first antigen-binding polypeptide comprising from N-terminus to C-terminus: a second binding domain, a first first binding domain, a first hinge region, a first subunit of an Fc domain or portion thereof, and a second first binding domain subunit (e.g., a p35 subunit or a p40 subunit of an IL-12 or variant thereof); and ii) a second antigen-binding polypeptide comprising from N-terminus to C-terminus: a third binding domain, optionally a third first binding domain, a second hinge region, a second subunit of the Fc domain or portion thereof, and a second first binding domain subunit (e.g., a p35 subunit or a p40 subunit of an IL-12 or variant thereof), wherein the first first binding domain specifically recognizes a first target molecule, wherein the second first binding domain specifically recognizes a second target molecule (e.g., IL-12 receptor), wherein the second binding domain specifically recognizes a third target molecule, wherein the third binding domain specifically recognizes a fourth target molecule, optionally wherein the optional third first binding domain recognizes a fifth target molecule, wherein the first first binding domain upon binding to the first target molecule up-regulates an immune response, wherein the second first binding domain upon binding to the second target molecule up-regulates an immune response, wherein the second binding domain upon binding to the third target molecule down-regulates the immune response, wherein the third binding domain upon binding to the fourth target molecule localize the immunomodulatory molecule to a tumor microenvironment, and optionally wherein the third first binding domain upon binding to the fifth target molecule up-regulates an immune response. See, e.g., FIG. 11C-11F. In some embodiments, the first, second, and/or third first binding domains are different. In some embodiments, the first, second, and/or third first binding domain specifically recognize the same epitope. In some embodiments, the first, second, and/or third first binding domain specifically recognize different epitopes.

[0137] In some embodiments, there is provided an immunomodulatory molecule comprising: i) a first antigen-binding polypeptide comprising from N-terminus to C-terminus: a second binding domain, a first hinge region, a first subunit of an Fc domain or portion thereof, and a first first binding domain subunit (e.g., a p35 subunit or a p40 subunit of an IL-12 or variant thereof); and ii) a second antigen-binding polypeptide comprising from N-terminus to C-terminus: a third binding domain, optionally a second first binding domain, a second hinge region, a second subunit of the Fc domain or portion thereof, and a first first binding domain subunit (e.g., a p35 subunit or a p40 subunit of an IL-12 or variant thereof), wherein the first first binding domain specifically recognizes a first target molecule (e.g., IL-12 receptor), wherein the second binding domain specifically recognizes a second target molecule, wherein the third binding domain specifically recognizes a third target molecule, optionally wherein the optional second first binding domain recognizes a fourth target molecule, wherein the first first binding domain upon binding to the first target molecule up-regulates an immune response, wherein the second binding domain upon binding to the second target molecule down-regulates the immune response, wherein the third binding domain upon binding to the third target molecule localize the immunomodulatory molecule to a tumor microenvironment, and optionally wherein the second first binding domain upon binding to the fourth target molecule up-regulates an immune response. See, e.g., FIG. 11I-11L. In some embodiments, the first and/or second first binding domains are different. In some embodiments, the first and/or second first binding domain specifically recognize the same epitope. In some embodiments, the first and/or second first binding domain specifically recognize different epitopes.

[0138] In some embodiments, there is provided an immunomodulatory molecule comprising: i) a first antigen-binding polypeptide comprising from N-terminus to C-terminus: a first second binding domain (e.g., PD-L2 or PD-L1 or variant thereof) positioned at the first hinge region, and a first subunit of an Fc domain or portion thereof, and ii) a second antigen-binding polypeptide comprising from N-terminus to C-terminus: a second second binding domain (e.g., PD-L2 or PD-L1 or variant thereof), a first binding domain (e.g., a p35 subunit and a p40 subunit of an IL-12 or variant thereof connected in tandem), a second hinge region, and a second subunit of the Fc domain or portion thereof, wherein the first binding domain specifically recognizes a first target molecule (e.g., IL-12 receptor), wherein the first and/or second second binding domain specifically recognizes a second target molecule (e.g., PD-1), wherein the first binding domain upon binding to the first target molecule (e.g., IL-12 receptor) up-regulates an immune response, and wherein the first and/or second second binding domain upon binding to the second target molecule (e.g., PD-1) down-regulates the immune response. See, e.g., FIG. 12A. In some embodiments, the first and/or second second binding domains are the same. In some embodiments, the first and/or second second binding domains are different. In some embodiments, the first and/or second second binding domain specifically recognize the same epitope. In some embodiments, the first and/or second second binding domain specifically recognize different epitopes.

[0139] In some embodiments, there is provided an immunomodulatory molecule comprising: i) a first antigen-binding polypeptide comprising from N-terminus to C-terminus: a first second binding domain (e.g., CD155 or variant thereof) positioned at the first hinge region, and a first subunit of an Fc domain or portion thereof; and ii) a second antigen-binding polypeptide comprising from N-terminus to C-terminus: a second second binding domain (e.g., PD-L2 or PD-L1 or variant thereof), a first binding domain (e.g., a p35 subunit and a p40 subunit of an IL-12 or variant thereof connected in tandem), a second hinge region, and a second subunit of the Fc domain or portion thereof, wherein the first binding domain specifically recognizes a first target molecule (e.g., IL-12 receptor), wherein the first second binding domain specifically recognizes a second target molecule (e.g., TIGIT), wherein the second second binding domain specifically recognizes a third target molecule (e.g. PD-1), wherein the first binding domain upon binding to the first target molecule (e.g., IL-12 receptor) up-regulates an immune response, and wherein the first and/or second second binding domain upon binding to the second target molecule (e.g., TIGIT and/or PD-1) down-regulates the immune response. See, e.g., FIG. 12B.

[0140] In some embodiments, there is provided an immunomodulatory molecule comprising: i) a first antigen-binding polypeptide comprising from N-terminus to C-terminus: a third binding domain (e.g. sdAb), a first hinge region, and a first subunit of an Fc domain or portion thereof, and ii) a second antigen-binding polypeptide comprising from N-terminus to C-terminus: a second binding domain (e.g., PD-L2 or PD-L1 or variant thereof), a first binding domain (e.g., a p35 subunit and a p40 subunit of an IL-12 or variant thereof connected in tandem), a second hinge region, and a second subunit of the Fc domain or portion thereof, wherein the first binding domain upon binding to the first target molecule (e.g., IL-12 receptor) up-regulates an immune response, wherein the second binding domain specifically recognizes a second target molecule (e.g., PD-1), wherein the third binding domain specifically recognizes a third target molecule (e.g. TIGIT, TIM3, LAG3, CTLA4, CD16A, HER2, Nectin-4, Trop2, or CLDN18.2, or variants thereof), wherein the first binding domain upon binding to the first target molecule (e.g., IL-12 receptor) up-regulates an immune response, and wherein the second binding domain upon binding to the second target molecule (e.g., PD-1) down-regulates the immune response, and wherein the third binding domain upon binding to the third target molecule (e.g., TIGIT, TIM3, LAG3, CTLA4, CD16A, HER2, Nectin-4, Trop2, or CLDN18.2, or variants thereof) localize the immunomodulatory molecule to a tumor microenvironment. See, e.g., FIG. 12C.

[0141] In some embodiments, there is provided an immunomodulatory molecule comprising: i) a first antigen-binding polypeptide comprising from N-terminus to C-terminus: a third binding domain (e.g., Fab comprising a VH and an optional CH1), a first hinge region, and a first subunit of an Fc domain or portion thereof, and ii) a second antigen-binding polypeptide comprising from N-terminus to C-terminus: a second binding domain (e.g., PD-L2 or PD-L1 or variant thereof), a first binding domain (e.g., a p35 subunit and a p40 subunit of an IL-12 or variant thereof connected in tandem), a second hinge region, and a second subunit of the Fc domain or portion thereof, wherein the first binding domain upon binding to the first target molecule (e.g., IL-12 receptor) up-regulates an immune response, wherein the second binding domain specifically recognizes a second target molecule (e.g., PD-1), wherein the third binding domain specifically recognizes a third target molecule (e.g. TIGIT, TIM3, LAG3, CTLA4, CD16A, HER2, Nectin-4, Trop2, or CLDN18.2, or variants thereof), wherein the first binding domain upon binding to the first target molecule (e.g., IL-12 receptor) up-regulates an immune response, and wherein the second binding domain upon binding to the second target molecule (e.g., PD-1) down-regulates the immune response, and wherein the third binding domain upon binding to the third target molecule (e.g., TIGIT, TIM3, LAG3, CTLA4, CD16A, HER2, Nectin-4, Trop2, or CLDN18.2) localize the immunomodulatory molecule to a tumor microenvironment. See, e.g., FIG. 12D.

[0142] In some embodiments, there is provided an immunomodulatory molecule comprising: i) a first antigen-binding polypeptide comprising from N-terminus to C-terminus: a first second binding domain (e.g., PD-L2 or PD-L1 or variant thereof) positioned at the first hinge region, and a first subunit of an Fc domain or portion thereof, and a first binding domain (e.g., a p35 subunit and a p40 subunit of an IL-12 or variant thereof connected in tandem); and ii) a second antigen-binding polypeptide comprising from N-terminus to C-terminus: a second second binding domain (e.g., PD-L2 or PD-L1 or variant thereof), a second hinge region, and a second subunit of the Fc domain or portion thereof, wherein the first binding domain specifically recognizes a first target molecule (e.g., IL-12 receptor), wherein the first and second second binding domain specifically recognizes a second target molecule (e.g., PD-1), wherein the first binding domain upon binding to the first target molecule (e.g., IL-12 receptor) up-regulates an immune response, and wherein the first and/or second second binding domain upon binding to the second target molecule (e.g., PD-1) down-regulates the immune response. See, e.g., FIG. 13A. In some embodiments, the first and/or second second binding domains are the same. In some embodiments, the first and/or second second binding domains are different. In some embodiments, the first and/or second second binding domain specifically recognize the same epitope. In some embodiments, the first and/or second second binding domain specifically recognize different epitopes.

[0143] In some embodiments, there is provided an immunomodulatory molecule comprising: i) a first antigen-binding polypeptide comprising from N-terminus to C-terminus: a first second binding domain (e.g., CD155 or variant thereof) positioned at the first hinge region, and a first subunit of an Fc domain or portion thereof; and ii) a second antigen-binding polypeptide comprising from N-terminus to C-terminus: a second second binding domain (e.g., PD-L2 or PD-L1 or variant thereof), a second hinge region, and a second subunit of the Fc domain or portion thereof, and a first binding domain (e.g., a p35 subunit and a p40 subunit of an IL-12 or variant thereof connected in tandem), wherein the first binding domain specifically recognizes a first target molecule (e.g., IL-12 receptor), wherein the first second binding domain specifically recognizes a second target molecule (e.g., TIGIT), wherein the second second binding domain specifically recognizes a third target molecule (e.g. PD-1), wherein the first binding domain upon binding to the first target molecule (e.g., IL-12 receptor) up-regulates an immune response, and wherein the first and/or second second binding domain upon binding to the second target molecule (e.g., TIGIT and/or PD-1) down-regulates the immune response. See, e.g., FIG. 13B.

[0144] In some embodiments, there is provided an immunomodulatory molecule comprising: i) a first antigen-binding polypeptide comprising from N-terminus to C-terminus: a second binding domain (e.g., PD-L2 or PD-L1 or variant thereof) positioned at the first hinge region, and a first subunit of an Fc domain or portion thereof, and a first binding domain (e.g., a p35 subunit and a p40 subunit of an IL-12 or variant thereof connected in tandem); and ii) a second antigen-binding polypeptide comprising from N-terminus to C-terminus: a third binding domain (e.g. a sdAb), a second hinge region, and a second subunit of an Fc domain or portion thereof, wherein the first binding domain upon binding to the first target molecule (e.g., IL-12 receptor) up-regulates an immune response, wherein the second binding domain specifically recognizes a second target molecule (e.g., PD-1), wherein the third binding domain specifically recognizes a third target molecule (e.g. TIGIT, TIM3, LAG3, CTLA4, CD16A, HER2, Nectin-4, Trop2, or CLDN18.2, or variants thereof), wherein the first binding domain upon binding to the first target molecule (e.g., IL-12 receptor) up-regulates an immune response, and wherein the second binding domain upon binding to the second target molecule (e.g., PD-1) down-regulates the immune response, and wherein the third binding domain upon binding to the third target molecule (e.g., TIGIT, TIM3, LAG3, CTLA4, CD16A, HER2, Nectin-4, Trop2, or CLDN18.2) localize the immunomodulatory molecule to a tumor microenvironment. See, e.g., FIG. 13C.

[0145] In some embodiments, there is provided an immunomodulatory molecule comprising: i) a first antigen-binding polypeptide comprising from N-terminus to C-terminus: a second binding domain (e.g., PD-L2 or PD-L1 or variant thereof) positioned at the first hinge region, and a first subunit of an Fc domain or portion thereof, and a first binding domain (e.g., a p35 subunit and a p40 subunit of an IL-12 or variant thereof connected in tandem); and ii) a second antigen-binding polypeptide comprising from N-terminus to C-terminus: a third binding domain (e.g., Fab comprising a V_{H} and an optional CH1), a second hinge region, and a second subunit of an Fc domain or portion thereof, wherein the first binding domain upon binding to the first target molecule (e.g., IL-12 receptor) up-regulates an immune response, wherein the second binding domain specifically recognizes a second target molecule (e.g., PD-1), wherein the third binding domain specifically recognizes a third target molecule (e.g. TIGIT, TIM3, LAG3, CTLA4, CD16A, HER2, Nectin-4, Trop2, or CLDN18.2, or variants thereof), wherein the first binding domain upon binding to the first target molecule (e.g., IL-12 receptor) up-regulates an immune response, and wherein the second binding domain upon binding to the second target molecule (e.g., PD-1) down-regulates the immune response, and wherein the third binding domain upon binding to the third target molecule (e.g., TIGIT, TIM3, LAG3, CTLA4, CD16A, HER2, Nectin-4, Trop2, or CLDN18.2) localize the immunomodulatory molecule to a tumor microenvironment. See, e.g., FIG. 13D.

[0146] In some embodiments, there is provided an immunomodulatory molecule comprising: i) a first antigen-binding polypeptide comprising from N-terminus to C-terminus: a first second binding domain (e.g., PD-L2 or PD-L1 or variant thereof), a first first binding domain (e.g. IL-2 or variant thereof), a first hinge region, a first subunit of an Fc domain or portion thereof; and ii) a second antigen-binding polypeptide comprising from N-terminus to C-terminus: a second second binding domain (e.g., PD-L2 or PD-L1 or variant thereof), a second first binding domain (e.g., a p35 subunit and a p40 subunit of an IL-12 or variant thereof connected in tandem), a second hinge region, and a second subunit of the Fc domain or portion thereof, wherein the first first binding domain specifically recognizes a first target molecule (e.g., IL-2 receptor), wherein the second first binding domain specifically recognizes a second target molecule (e.g. IL-12 receptor), wherein the first and second second binding domain specifically recognizes a third target molecule (e.g., PD-1), wherein the first first binding domain upon binding to the first or target molecule (e.g., IL-2 receptor) up-regulates an immune response, wherein the second first binding domain upon binding to the second target molecule (e.g., IL-12 receptor) up-regulates an immune response, and wherein the first and/or second second binding domain upon binding to the third target molecule (e.g., PD-1) down-regulates the immune response. See, e.g., FIG. 14A. In some embodiments, the first and/or second first binding domains are the same. In some embodiments, the first and/or second first binding domains are different. In some embodiments, the first and/or second first binding domain specifically recognize the same epitope. In some embodiments, the first and/or second first binding domain specifically recognize different epitopes. In some embodiments, the first and/or second second binding domains are the same. In some embodiments, the first and/or second second binding domains are different. In some embodiments, the first and/or second second binding domain specifically recognize the same epitope. In some embodiments, the first and/or second second binding domain specifically recognize different epitopes.

[0147] In some embodiments, there is provided an immunomodulatory molecule comprising: i) a first antigen-binding polypeptide comprising from N-terminus to C-terminus: a first second binding domain (e.g., CD155 or variant thereof), a first first binding domain (e.g. TL-2 or variant thereof), a first hinge region, a first subunit of an Fc domain or portion thereof; and ii) a second antigen-binding polypeptide comprising from N-terminus to C-terminus: a second second binding domain (e.g., PD-L2 or PD-L1 or variant thereof), a second first binding domain (e.g., a p35 subunit and a p40 subunit of an IL-12 or variant thereof connected in tandem), a second hinge region, and a second subunit of the Fc domain or portion thereof, wherein the first first binding domain specifically recognizes a first target molecule (e.g., IL-2 receptor), wherein the second first binding domain specifically recognizes a second target molecule (e.g. IL-12 receptor), wherein the first second binding domain specifically recognizes a third target molecule (e.g., TIGIT), wherein the second second binding domain specifically recognizes a fourth target molecule (e.g. PD-1), wherein the first first binding domain upon binding to the first or target molecule (e.g., IL-2 receptor) up-regulates an immune response, wherein the second first binding domain upon binding to the second target molecule (e.g., IL-12 receptor) up-regulates an immune response, wherein the first second binding domain upon binding to the third target molecule (e.g. TIGIT) down-regulates the immune response, and wherein the second second binding domain upon binding to the fourth target molecule (e.g., PD-1) down-regulates the immune response. See, e.g., FIG. 14B.

[0148] In some embodiments, there is provided an immunomodulatory molecule comprising: i) a first antigen-binding polypeptide comprising from N-terminus to C-terminus: a third binding domain (e.g., a sdAb), a first first binding domain (e.g. IL-2 or variant thereof), a first hinge region, a first subunit of an Fc domain or portion thereof; and ii) a second antigen-binding polypeptide comprising from N-terminus to C-terminus: a second binding domain (e.g., PD-L2 or PD-L1 or variant thereof), a second first binding domain (e.g., a p35 subunit and a p40 subunit of an IL-12 or variant thereof connected in tandem), a second hinge region, and a second subunit of the Fc domain or portion thereof, wherein the first first binding domain specifically recognizes a first target molecule (e.g., IL-2 receptor), wherein the second first binding domain specifically recognizes a second target molecule (e.g. IL-12 receptor), wherein the second binding domain specifically recognizes a third target molecule (e.g., PD-1), wherein the third binding domain specifically recognizes a fourth target molecule (e.g., TIGIT, TIM3, LAG3, CTLA4, CD16A, HER2, Nectin-4, Trop2, or CLDN18.2) wherein the first first binding domain upon binding to the first or target molecule (e.g., IL-2 receptor) up-regulates an immune response, wherein the second first binding domain upon binding to the second target molecule (e.g., IL-12 receptor) up-regulates an immune response, wherein the second binding domain upon binding to the third target molecule (e.g., PD-1) down-regulates the immune response, and wherein the third binding domain upon binding to the fourth target molecule (e.g., TIGIT, TIM3, LAG3, CTLA4, CD16A, HER2, Nectin-4, Trop2, or CLDN18.2) localize the immunomodulatory molecule to a tumor microenvironment. See, e.g., FIG. 14C.

[0149] In some embodiments, there is provided an immunomodulatory molecule comprising: i) a first antigen-binding polypeptide comprising from N-terminus to C-terminus: a third binding domain (e.g., a Fab comprising a VH and an optional CH1), a first first binding domain (e.g. IL-2 or variant thereof), a first hinge region, a first subunit of an Fc domain or portion thereof; and ii) a second antigen-binding polypeptide comprising from N-terminus to C-terminus: a second binding domain (e.g., PD-L2 or PD-L1 or variant thereof), a second first binding domain (e.g., a p35 subunit and a p40 subunit of an IL-12 or variant thereof connected in tandem), a second hinge region, and a second subunit of the Fc domain or portion thereof, wherein the first first binding domain specifically recognizes a first target molecule (e.g., IL-2 receptor), wherein the second first binding domain specifically recognizes a second target molecule (e.g. IL-12 receptor), wherein the second binding domain specifically recognizes a third target molecule (e.g., PD-1), wherein the third binding domain specifically recognizes a fourth target molecule (e.g., TIGIT, TIM3, LAG3, CTLA4, CD16A, HER2, Nectin-4, Trop2, or CLDN18.2) wherein the first first binding domain upon binding to the first or target molecule (e.g., IL-2 receptor) up-regulates an immune response, wherein the second first binding domain upon binding to the second target molecule (e.g., IL-12 receptor) up-regulates an immune response, wherein the second binding domain upon binding to the third target molecule (e.g., PD-1) down-regulates the immune response, and wherein the third binding domain upon binding to the fourth target molecule (e.g., TIGIT, TIM3, LAG3, CTLA4, CD16A, HER2, Nectin-4, Trop2, or CLDN18.2) localize the immunomodulatory molecule to a tumor microenvironment. See, e.g., FIG. 14D.

[0150] In some embodiments, there is provided an immunomodulatory molecule comprising: i) a first antigen-binding polypeptide comprising from N-terminus to C-terminus: a first second binding domain (e.g., PD-L2 or PD-L1 or variant thereof) positioned at the first hinge region, and a first subunit of an Fc domain or portion thereof, and a first first binding domain (e.g., a p35 subunit and a p40 subunit of an IL-12 or variant thereof connected in tandem); and ii) a second antigen-binding polypeptide comprising from N-terminus to C-terminus: a second second binding domain (e.g., PD-L2 or PD-L1 or variant thereof), a second first binding domain (e.g., IL-2 or variant thereof), a second hinge region, and a second subunit of the Fc domain or portion thereof, wherein the first first binding domain specifically recognizes a first target molecule (e.g., IL-12 receptor), wherein the second first binding domain specifically recognizes a second target molecule (e.g. IL-2 receptor), wherein the first and second second binding domain specifically recognizes a third target molecule (e.g., PD-1), wherein the first first binding domain upon binding to the first target molecule (e.g., IL-12 receptor) up-regulates an immune response, wherein the second first binding domain upon binding to the second target molecule (e.g., IL-2 receptor) up-regulates an immune response, and wherein the first and/or second second binding domain upon binding to the third target molecule (e.g., PD-1) down-regulates the immune response. See, e.g., FIG. 15A. In some embodiments, the first and/or second first binding domains are the same. In some embodiments, the first and/or second first binding domains are different. In some embodiments, the first and/or second first binding domain specifically recognize the same epitope. In some embodiments, the first and/or second first binding domain specifically recognize different epitopes. In some embodiments, the first and/or second second binding domains are the same. In some embodiments, the first and/or second second binding domains are different. In some embodiments, the first and/or second second binding domain specifically recognize the same epitope. In some embodiments, the first and/or second second binding domain specifically recognize different epitopes.

[0151] In some embodiments, there is provided an immunomodulatory molecule comprising: i) a first antigen-binding polypeptide comprising from N-terminus to C-terminus: a first second binding domain (e.g., PD-L2 or PD-L1 or variant thereof) positioned at the first hinge region, and a first subunit of an Fc domain or portion thereof, and a first first binding domain (e.g., a p35 subunit and a p40 subunit of an IL-12 or variant thereof connected in tandem); and ii) a second antigen-binding polypeptide comprising from N-terminus to C-terminus: a second second binding domain (e.g., CD155 or variant thereof), a second first binding domain (e.g., IL-2 or variant thereof), a second hinge region, and a second subunit of the Fc domain or portion thereof, wherein the first first binding domain specifically recognizes a first target molecule (e.g., IL-12 receptor), wherein the second first binding domain specifically recognizes a second target molecule (e.g. IL-2 receptor), wherein the first second binding domain specifically recognizes a third target molecule (e.g., PD-1), wherein the second second binding domain recognizes a fourth target molecule (e.g., TIGIT), wherein the first first binding domain upon binding to the first target molecule (e.g., IL-12 receptor) up-regulates an immune response, wherein the second first binding domain upon binding to the second target molecule (e.g., IL-2 receptor) up-regulates an immune response, wherein the first second binding domain upon binding to the third target molecule (e.g., PD-1) down-regulates the immune response, and wherein the second second binding domain upon binding to the third target molecule (e.g., TIGIT) down regulates the immune response. See, e.g., FIG. 15B.

[0152] In some embodiments, there is provided an immunomodulatory molecule comprising: i) a first antigen-binding polypeptide comprising from N-terminus to C-terminus: a first second binding domain (e.g., PD-L2 or PD-L1 or variant thereof) positioned at the first hinge region, and a first subunit of an Fc domain or portion thereof, and a first first binding domain (e.g., a p35 subunit and a p40 subunit of an IL-12 or variant thereof connected in tandem); and ii) a second antigen-binding polypeptide comprising from N-terminus to C-terminus: a third binding domain (e.g., a sdAb), a second first binding domain (e.g., IL-2 or variant thereof), a second hinge region, and a second subunit of an Fc domain or portion thereof, wherein the first first binding domain specifically recognizes a first target molecule (e.g., IL-12 receptor), wherein the second first binding domain specifically recognizes a second target molecule (e.g. IL-2 receptor), wherein the second binding domain specifically recognizes a third target molecule (e.g., PD-1), wherein the third binding domain specifically recognizes a fourth target molecule (e.g., TIGIT, TIM3, LAG3, CTLA4, CD16A, HER2, Nectin-4, Trop2, or CLDN18.2) wherein the first first binding domain upon binding to the first or target molecule (e.g., IL-12 receptor) up-regulates an immune response, wherein the second first binding domain upon binding to the second target molecule (e.g., IL-2 receptor) up-regulates an immune response, wherein the second binding domain upon binding to the third target molecule (e.g., PD-1) down-regulates the immune response, and wherein the third binding domain upon binding to the fourth target molecule (e.g., TIGIT, TIM3, LAG3, CTLA4, CD16A, HER2, Nectin-4, Trop2, or CLDN18.2) localize the immunomodulatory molecule to a tumor microenvironment. See, e.g., FIG. 15C.

[0153] In some embodiments, there is provided an immunomodulatory molecule comprising: i) a first antigen-binding polypeptide comprising from N-terminus to C-terminus: a first second binding domain (e.g., PD-L2 or PD-L1 or variant thereof) positioned at the first hinge region, and a first subunit of an Fc domain or portion thereof, and a first first binding domain (e.g., a p35 subunit and a p40 subunit of an IL-12 or variant thereof connected in tandem); and ii) a second antigen-binding polypeptide comprising from N-terminus to C-terminus: a third binding domain (e.g., a Fab comprising a VH and an optional CH1), a second first binding domain (e.g., IL-2 or variant thereof), a second hinge region, and a second subunit of an Fc domain or portion thereof, wherein the first first binding domain specifically recognizes a first target molecule (e.g., IL-12 receptor), wherein the second first binding domain specifically recognizes a second target molecule (e.g. IL-2 receptor), wherein the second binding domain specifically recognizes a third target molecule (e.g., PD-1), wherein the third binding domain specifically recognizes a fourth target molecule (e.g., TIGIT, TIM3, LAG3, CTLA4, CD16A, HER2, Nectin-4, Trop2, or CLDN18.2) wherein the first first binding domain upon binding to the first or target molecule (e.g., IL-12 receptor) up-regulates an immune response, wherein the second first binding domain upon binding to the second target molecule (e.g., IL-2 receptor) up-regulates an immune response, wherein the second binding domain upon binding to the third target molecule (e.g., PD-1) down-regulates the immune response, and wherein the third binding domain upon binding to the fourth target molecule (e.g., TIGIT, TIM3, LAG3, CTLA4, CD16A, HER2, Nectin-4, Trop2, or CLDN18.2) localize the immunomodulatory molecule to a tumor microenvironment. See, e.g., FIG. 15D.

[0154] In some embodiments, there is provided an immunomodulatory molecule as described in any of FIGS. 1A-1W and 11A-15D, Examples, and Sequence Listing herein.

### Binding Domains Specifically Recognizing Target Molecules

[0155] The immunomodulatory molecules described herein comprise a first binding domain specifically recognizing a first target molecule and a second binding domain specifically recognizing a second target molecule, wherein the first binding domain upon binding to the first target molecule up-regulates an immune response, and wherein the second binding domain upon binding to the second target molecule down-regulates the immune response.

[0156] In some embodiments, the first binding domain upon binding to the first target molecule up-regulates the immune response by an activity (“up-regulated activity”) selected from one or more of up-regulating release of an immunostimulatory cytokine, down-regulating release of an immunosuppressive cytokine, up-regulating immune cell proliferation, up-regulating immune cell differentiation, up-regulating immune cell activation, up-regulating cytotoxicity against a tumor cell, and up-regulating elimination of an infectious agent.

[0157] In some embodiments, the second binding domain upon binding to the second target molecule down-regulates the immune response by an activity (“down-regulated activity”) selected from one or more of down-regulating release of an immunostimulatory cytokine, up-regulating release of an immunosuppressive cytokine, down-regulating immune cell proliferation, down-regulating immune cell differentiation, down-regulating immune cell activation, down-regulating cytotoxicity against a tumor cell, and down-regulating elimination of an infectious agent.

[0158] In some embodiments, the first binding domain upon binding to the first target molecule, and the second binding domain upon binding to the second target molecule, modulate (e.g., modulate at least about any of 10%, 20%, 30%, 40%, 50%, 60%, 70%, 80%, 90%, 100%, or more) the immune response by an activity independently selected from one or more of cytokine release, immune cell proliferation, immune cell differentiation, immune cell activation, cytotoxicity against a tumor cell, and up-regulating elimination of an infectious agent. For example, in some embodiments, the first binding domain upon binding to the first target molecule up-regulates (e.g., up-regulates (or down-regulates in the case of release of an immunosuppressive cytokine) at least about any of 10%, 20%, 30%, 40%, 50%, 60%, 70%, 80%, 90%, 100%, or more) the immune response by an activity (“up-regulated activity”) selected from one or more of up-regulating release of an immunostimulatory cytokine, down-regulating release of an immunosuppressive cytokine, up-regulating immune cell proliferation, up-regulating immune cell differentiation, up-regulating immune cell activation, up-regulating cytotoxicity against a tumor cell, and up-regulating elimination of an infectious agent. In some embodiments, the second binding domain upon binding to the second target molecule down-regulates (e.g., down-regulates (or up-regulates in the case of release of an immunosuppressive cytokine) at least about any of 10%, 20%, 30%, 40%, 50%, 60%, 70%, 80%, 90%, or 100%) the immune response by an activity (“down-regulated activity”) selected from one or more of down-regulating release of an immunostimulatory cytokine, up-regulating release of an immunosuppressive cytokine, down-regulating immune cell proliferation, down-regulating immune cell differentiation, down-regulating immune cell activation, down-regulating cytotoxicity against a tumor cell, and down-regulating elimination of an infectious agent. In some embodiments, the immunostimulatory cytokine is selected from the group consisting of IL-1, IL-2, IL-3, IL-4, IL-5, IL-6, IL-7, IL-8, IL-9, IL-12, IL-15, IL-17, IL-18, IL-21, IL-22, IL-23, IL-27, IFN-α, IFN-β, IFN-γ, TNF-α, erythropoietin, thrombopoietin, G-CSF, M-CSF, SCF, and GM-CSF. In some embodiments, the immunosuppressive cytokine is selected from the group consisting of IL-1Ra, IL-4, IL-5, IL-6, IL-10, IL-11, IL-13, IL-27, IL-33, IL-35, IL-37, IL-39, IFN-α, LIF, and TGF-β.

[0159] In some embodiments, the first target molecule and/or the second target molecule is a stimulatory checkpoint molecule. In some embodiments, the stimulatory checkpoint molecule is selected from the group consisting of CD27, CD28, CD40, CD122, CD137, OX40, GITR, and ICOS. In some embodiments, the first binding domain is an agonist antibody or antigen-binding fragment thereof. In some embodiments, the agonist ligand is selected from the group consisting of CD27L (TNFSF7, CD70), CD40L (CD154), CD80, CD86, CD137L, OX40L (CD252), GITRL, and ICOSLG (CD275). In some embodiments, the first binding domain is a variant of an agonist ligand, and wherein the variant of the agonist ligand has increased (e.g., increase at least about any of 10%, 20%, 30%, 40%, 50%, 60%, 70%, 80%, 90%, 100% or more) activity (e.g., binding affinity and/or biological activity) to the first target molecule compared to the agonist ligand. In some embodiments, the first binding domain is a variant of an agonist ligand, and wherein the variant of the agonist ligand has decreased (e.g., decrease at least about any of 10%, 20%, 30%, 40%, 50%, 60%, 70%, 80%, 90%, or 100%) activity (e.g., binding affinity and/or biological activity) to the first target molecule compared to the agonist ligand. In some embodiments, the second binding domain is an antagonist antibody or antigen-binding fragment thereof (e.g., VH, VHH, scFv, Fab, full-length Ab). In some embodiments, the second binding domain is an antagonist ligand or variant thereof. In some embodiments, the second binding domain is a variant of an antagonist ligand, and wherein the variant of the antagonist ligand has increased (e.g., increase at least about any of 10%, 20%, 30%, 40%, 50%, 60%, 70%, 80%, 90%, 100% or more) activity (e.g., binding affinity and/or biological activity) to the second target molecule compared to the antagonist ligand. In some embodiments, the second binding domain is a variant of an antagonist ligand, and wherein the variant of the antagonist ligand has decreased (e.g., decrease at least about any of 10%, 20%, 30%, 40%, 500%, 60%, 70%, 80%, 90%, or 100%) activity (e.g., binding affinity and/or biological activity) to the second target molecule compared to the antagonist ligand.

[0160] In some embodiments, the first target molecule and/or the second target molecule is a receptor of an immunostimulatory cytokine. In some embodiments, the immunostimulatory cytokine is selected from the group consisting of IL-1, IL-2, IL-3, IL-4, IL-5, IL-6, IL-7, IL-8, IL-9, IL-12, IL-15, IL-17, IL-18, IL-21, IL-22, IL-23, IL-27, IFN-α, IFN-β, IFN-γ, TNF-α, erythropoietin, thrombopoietin, G-CSF, M-CSF, SCF, and GM-CSF. In some embodiments, the first binding domain is the immunostimulatory cytokine or variant thereof. In some embodiments, the first binding domain is a variant of an immunostimulatory cytokine, and wherein the variant of the immunostimulatory cytokine has increased (e.g., increase at least about any of 10%, 20%, 30%, 40%, 50%, 60%, 70%, 80%, 90%, 100% or more) or decreased (e.g., decrease at least about any of 10%, 20%, 30%, 40%, 50%, 60%, 70%, 80%, 90%, or 100%) activity (e.g., binding affinity and/or biological activity) to the first target molecule compared to the immunostimulatory cytokine. In some embodiments, the first binding domain is IL-2 or variant thereof. In some embodiments, the first binding domain is an IL-2 variant that has decreased (e.g., decrease at least about any of 10%, 20%, 30%, 40%, 50%, 60%, 70%, 80%, 90%, or 100%) activity (e.g., binding affinity and/or biological activity) to IL-2 receptor compared to a wild-type IL-2. In some embodiments, the first binding domain is IL-12 or variant thereof. In some embodiments, the first binding domain is an IL-12 variant that has decreased (e.g., decrease at least about any of 10%, 20%, 30%, 40%, 50%, 60%, 70%, 80%, 90%, or 100%) activity (e.g., binding affinity and/or biological activity) to IL-12 receptor compared to a wild-type IL-12. In some embodiments, the first binding domain is an agonist antibody or antigen-binding fragment thereof (e.g., VH, VHH, scFv, Fab, full-length Ab, such as an agonist of IL-12 receptor signaling). In some embodiments, the second binding domain is an antagonist antibody or antigen-binding fragment thereof (e.g., VII, V_{H}H, scFv, Fab, full-length Ab). In some embodiments, the second binding domain is antagonist ligand or variant thereof (e.g., blocks or reduces IL-12 receptor signaling). In some embodiments, the second binding domain is a variant of an antagonist ligand, and wherein the variant of the antagonist ligand has increased (e.g., increase at least about any of 10%, 20%, 30%, 40%, 50%, 60%, 70%, 80%, 90%, 100% or more) or decreased (e.g., decrease at least about any of 10%, 20%, 30%, 40%, 50%, 60%, 70%, 80%, 90%, or 100%) activity (e.g., binding affinity and/or biological activity) to the second target molecule compared to the antagonist ligand.

[0161] The receptor of IL-2, interleukin-2 receptor (IL-2R), is a heterotrimeric protein expressed on the surface of certain immune cells, such as lymphocytes. IL-2R has three forms generated by different combinations of a chain (IL-2Rα, CD25, Tac antigen), β chain (IL-2Rβ, CD122), and γ chain (IL-2Rγ, γ_{c}, common gamma chain, or CD132). IL-2Rα binds IL-2 with low affinity, and the complex of IL-2Rβ and IL-2Rγ binds IL-2 with intermediate affinity, primarily on memory T cells and NK cells. The complex of all α, β, and γ chains bind IL-2 with high affinity on activated T cells and regulatory T cells (Tregs). CD25 (IL-2Rα) plays a critical role in the development and maintenance of Tregs, and may play a role in Treg expression of CD62L, which is required for the entry of Tregs into lymph nodes (Malek and Bayer, 2004). CD25 is a marker for activated T cells and Treg. Experimental data suggested an immunosuppressive capacity of antagonist anti-CD25 that significantly delayed rejection of heart allografts in the mouse (Kirkman et al., 1985) and of renal allografts in nonhuman primates (Reed et al., 1989). Exemplary antagonist anti-CD25 antibodies include, but are not limited to basiliximab (e.g., Simulect®), daclizumab (e.g., Zinbryta®).

[0162] In some embodiments, the first target molecule and/or the second target molecule is an activating immune cell surface receptor. In some embodiments, the activating immune cell surface receptor is selected from the group consisting of CD2, CD3, CD4, CD8, CD16, CD56, CD96, CD161, CD226, NKG2C, NKG2D, NKG2E, NKG2F, NKG2H, NKp30, NKp44, NKp46, CD11c, CD11b, CD13, CD45RO, CD33, CD123, CD62L, CD45RA, CD36, CD163, and CD206. In some embodiments, the first binding domain is an agonist antibody or antigen-binding fragment thereof (e.g., VH, VHH, scFv, Fab, full-length Ab). In some embodiments, the first binding domain is an agonist ligand or variant thereof. In some embodiments, the first binding domain is a variant of an agonist ligand, and wherein the variant of the agonist ligand has increased (e.g., increase at least about any of 10%, 20%, 30%, 40%, 50%, 60%, 70%, 80%, 90%, 100% or more) or decreased (e.g., decrease at least about any of 10%, 20%, 30%, 40%, 50%, 60%, 70%, 80%, 90%, or 100%) activity (e.g., binding affinity and/or biological activity) to the first target molecule compared to the agonist ligand. In some embodiments, the second binding domain is an antagonist antibody or antigen-binding fragment thereof (e.g., VH, VHH, scFv, Fab, full-length Ab). In some embodiments, the second binding domain is an antagonist ligand or variant thereof. In some embodiments, the second binding domain is a variant of an antagonist ligand, and wherein the variant of the antagonist ligand has increased (e.g., increase at least about any of 10%, 20%, 30%, 40%, 50%, 60%, 70%, 80%, 90%, 100% or more) or decreased (e.g., decrease at least about any of 10%, 20%, 30%, 40%, 50%, 60%, 70%, 80%, 90%, or 100%) activity (e.g., binding affinity and/or biological activity) to the second target molecule compared to the antagonist ligand.

[0163] In some embodiments, the first target molecule and/or the second target molecule is an inhibitory checkpoint molecule. In some embodiments, the inhibitory checkpoint molecule is selected from the group consisting of PD-1, PD-L1, PD-L2, CTLA-4, LAG-3, TIM-3, HHLA2, CD47, CXCR4, CD160, CD73, BLTA, B7-H4, TIGIT, Siglec7, Siglec9, and VISTA. In some embodiments, the first binding domain is an antagonist ligand or variant thereof (e.g., blocks or reduces PD-1 signaling). In some embodiments, the first binding domain is an antagonist ligand or variant thereof of PD-1. In some embodiments, the first binding domain is a variant of an antagonist ligand, and wherein the variant of the antagonist ligand has increased (e.g., increase at least about any of 10%, 20%, 30%, 40%, 50%, 60%, 70%, 80%, 90%, 100% or more) or decreased (e.g., decrease at least about any of 10%, 20%, 30%, 40%, 50%, 60%, 70%, 80%, 90%, or 100%) activity (e.g., binding affinity and/or biological activity) to the first target molecule compared to the antagonist ligand. In some embodiments, the first binding domain is an antagonist antibody or antigen-binding fragment thereof (e.g., VH, VHH, scFv, Fab, full-length Ab). In some embodiments, the first binding domain is an antagonist anti-PD-1 antibody or antigen-binding fragment thereof. In some embodiments, the second binding domain is an agonist antibody or antigen-binding fragment thereof (e.g., VH, VHH, scFv, Fab, full-length Ab). In some embodiments, the agonist antibody or antigen-binding fragment thereof specifically recognizes PD-1, TIGIT, LAG-3, TIM-3, or CTLA-4. In some embodiments, the second binding domain is an agonist ligand or variant thereof. In some embodiments, the second target molecule is PD-1, and the second binding domain is PD-L1, PD-L2, or variant thereof. In some embodiments, the second target molecule is TIGIT, and the second binding domain is CD112 (PVRL2, nectin-2), CD155 (PVR), or variant thereof. In some embodiments, the second target molecule is LAG-3, and wherein the second binding domain is MHC II, LSECtin, or variant thereof. In some embodiments, the second target molecule is TIM-3, and wherein the second binding domain is Galectin-9, Caecam-1, HMGB-1, phosphatidylserine, or variant thereof. In some embodiments, the second target molecule is CTLA-4, and wherein the second binding domain is CD80, CD86, or variant thereof. In some embodiments, the second binding domain is a variant of an agonist ligand, and wherein the variant of the agonist ligand has increased (e.g., increase at least about any of 10%, 20%, 30%, 40%, 50%, 60%, 70%, 80%, 90%, 100% or more) or decreased (e.g., decrease at least about any of 10%, 20%, 30%, 40%, 50%, 60%, 70%, 80%, 90%, or 100%) activity (e.g., binding affinity and/or biological activity) to the second target molecule compared to the agonist ligand. In some embodiments, the second binding domain is a variant of PD-L1 (or PD-L2), that has increased (e.g., increase at least about any of 10%, 20%, 30%, 40%, 50%, 60%, 70%, 80%, 90%, 100% or more) or decreased (e.g., decrease at least about any of 10%, 20%, 30%, 40%, 50%, 60%, 70%, 80%, 90%, or 100%) activity (e.g., binding affinity and/or biological activity) to PD-1 compared to the wild-type PD-L1 (or PD-L2). In some embodiments, the second binding domain comprises an extracellular domain of the agonist ligand or variant thereof.

[0164] PD-1 (programmed cell death protein 1) is a part of the B7/CD28 family of co-stimulatory molecules that regulate T-cell activation and tolerance, and thus antagonistic anti-PD-1 antibodies or PD-1 ligand-Fc fusion protein can be useful for overcoming tolerance. PD-1 has been defined as a receptor for B7-4. B7-4 can inhibit immune cell activation upon binding to an inhibitory receptor on an immune cell. Engagement of the PD-1/PD-L1 pathway results in inhibition of T-cell effector function, cytokine secretion and proliferation. (Turnis et al., OncoImmunology 1(7):1172-1174, 2012). High levels of PD-1 are associated with exhausted or chronically stimulated T cells. Moreover, increased PD-1 expression correlates with reduced survival in cancer patients. Agents for down modulating PD-1, B7-4, and the interaction between B7-4 and PD-1 inhibitory signal in an immune cell can result in enhancement of the immune response. Exemplary antagonist anti-PD-1 antibodies include, but are not limited to, pembrolizumab (e.g., Keytruda®), cemiplimab (Libtayo®), and nivolumab (e.g., Opdivo®).

[0165] In some embodiments, the second binding domain comprises an anti-PD-1 antibody fragment derived from nivolumab (antagonist). In some embodiments, the anti-PD-1 antibody fragment comprises VH-CDR1 and VH-CDR2, and VH-CDR3 of a VH comprising the sequence of SEQ ID NO: 48, and VL-CDR1, VL-CDR2, and VL-CDR3 of a VL comprising the sequence of SEQ ID NO: 49. In some embodiments, VH-CDR3 further comprises any one of the following mutations relative to SEQ ID NO: 48: D100N, D100G, D100R, N99G, N99A, or N99M. In some embodiments, the anti-PD-1 antibody fragment comprising such VH-CDR3 mutations have reduced binding affinity (e.g., reduced at least about 2, 3, 4, 5, 6, 7, 8, 9, 10, 20, 50, 100, 1000, or more fold) to PD-1 compared to nivolumab.

[0166] In some embodiments, the second binding domain is an agonist antibody or antigen-binding fragment thereof specifically recognizes PD-1 (“anti-PD-1 agonist antibody or antigen-binding fragment thereof”).

[0167] PD-L1 (programmed cell death-ligand 1) is also known as cluster of differentiation 274 (CD274) or B7 homolog 1 (B7-H1). PD-L1 serves as a ligand for PD-1 to play a major role in suppressing the immune system during particular events such as pregnancy, tissue allographs, autoimmune disease and other disease states such as hepatitis and cancer. The formation of PD-1 receptor/PD-L1 ligand complex transmits an inhibitory signal, which reduces the proliferation of CD8⁺ T cells at the lymph nodes. Exemplary antagonist anti-PD-L1 antibodies include, but are not limited to, atezolizumab (e.g., Tecentriq®), avelumab (e.g., Bavencio®), and durvalumab (e.g., IMFINZI™).

[0168] In some embodiments, the second binding domain is PD-L1 or variant thereof. In some embodiments, the wt PD-L1 extracellular domain comprises the sequence of SEQ ID NO: 121. In some embodiments, the second binding domain is a PD-L1 variant, and the PD-L1 variant has increased (e.g., increase at least about any of 10%, 20%, 30%, 40%, 50%, 60%, 70%, 80%, 90%, 100% or more) activity (e.g., binding affinity and/or biological activity) to PD-1 compared to a wildtype PD-L1. In some embodiments, the PD-L1 variant comprises one or more mutations at a position selected from the group consisting of 154, Y56, E58, R113, M115, S117, and G119 relative to a wildtype PD-L1 (SEQ ID NO: 120). In some embodiments, the PD-L1 variant comprises one or more mutations selected from the group consisting of I54Q, Y56F, E58M, R113T, M115L, S117A, and G119K relative to a wildtype PD-L1 (SEQ ID NO: 120). In some embodiments, the PD-L1 variant comprises an I54Q/Y56F/E58M/R 113T/MI 15L/S117A/G119K mutation relative to a wildtype PD-L1 (SEQ ID NO: 120). In some embodiments, the mutant PD-L1 extracellular domain comprises the sequence of any one of SEQ ID NOs: 122-129.

[0169] PD-L2 (programmed cell death 1 ligand 2, B7-DC, CD273) is another immune checkpoint receptor ligand of PD-1. PD-L2 plays a role in negative regulation of the adaptive immune response. Engagement of PD-1 by PD-L2 dramatically inhibits T cell receptor (TCR)-mediated proliferation and cytokine production by T cells. At low antigen concentrations, PD-L2-PD-1 interactions inhibit strong B7-CD28 signals. In contrast, at high antigen concentrations, PD-L2-PD-1 interactions reduce cytokine production but do not inhibit T cell proliferation.

[0170] In some embodiments, the second binding domain is PD-L2 or variant thereof. In some embodiments, the second binding domain is a PD-L2 variant, and the PD-L2 variant has increased (e.g., increase at least about any of 10%, 20%, 30%, 40%, 50%, 60%, 70%, 80%, 90%, 100% or more) activity (e.g., binding affinity and/or biological activity) to PD-1 compared to a wildtype PD-L2.

[0171] In some embodiments, the PD-L2 extracellular domain comprises the sequence of SEQ ID NO: 106. In some embodiments, the PD-L2 extracellular domain or portion thereof is derived from wildtype (e.g., wildtype human) PD-L2. In some embodiments, the PD-L2 extracellular domain or portion thereof comprises one or more mutations (e.g., deletion, insertion, or replacement). In some embodiments, the PD-L2 variant comprises one or more mutations at a position selected from the group consisting of T56, S58, and Q60 (e.g., T56V, S58V, Q60L/T56V, S58V/Q60L) relative to a wildtype PD-L2 (SEQ ID NO; 105). In some embodiments, the mutated PD-L2 extracellular domain or portion thereof has increased (such as any of about 2, 3, 4, 5, 10, 50, 100, 100-fold higher) binding affinity to PD-1 compared to wildtype PD-L2 extracellular domain or portion thereof. In some embodiments, the mutant PD-L2 extracellular domain comprises the sequence of any one of SEQ ID NOs: 107-110. In some embodiments, the mutated PD-L2 extracellular domain or portion thereof has reduced (such as any of about 2, 3, 4, 5, 10, 50, 100, 100-fold lower) binding affinity to PD-1 compared to wildtype PD-L2 extracellular domain or portion thereof.

[0172] Cytotoxic T-Lymphocyte-Associated protein 4 (CTLA-4, or CD152) is a homolog of CD28, and is known as an inhibitory immune checkpoint molecule upregulated on activated T-cells. CTLA-4 also binds to B7-1 and B7-2, but with greater affinity than CD28. The interaction between B7 and CTLA-4 dampens T cell activation, which constitutes an important mechanism of tumor immune escape. Antagonist anti-CTLA-4 antibody therapy has shown promise in a number of cancers, such as melanoma. Exemplary antagonist anti-CTLA-4 antibodies include, but are not limited to, ipilimumab (e.g., Yervoy®).

[0173] In some embodiments, the second binding domain is CD155 (e.g., extracellular domain) or variant thereof. In some embodiments, the extracellular domain of wildtype human CD155 comprises the sequence of SEQ ID NO: 137. CD155 can bind to TIGIT, and down-regulates immune response.

[0174] In some embodiments, the first target molecule and/or the second target molecule is a receptor of an immunosuppressive cytokine. In some embodiments, the immunosuppressive cytokine is selected from the group consisting of IL-1 Ra, IL-4, IL-5, TL-6, IL-10, IL-11, IL-13, TL-27, IL-33, IL-35, IFN-α, LIF, and TGF-β. In some embodiments, the second binding domain is the immunosuppressive cytokine or variant thereof. In some embodiments, the second binding domain is a variant of the immunosuppressive cytokine, and the variant of the immunosuppressive cytokine has increased (e.g., increase at least about any of 10%, 20%, 30%/0, 40%, 50%, 60%, 70%, 80%, 90%, 100% or more) or decreased (e.g., decrease at least about any of 10%, 20%, 30%, 40%, 50%, 60%, 70%, 80%, 90%, or 100%) activity (e.g., binding affinity and/or biological activity) to the second target molecule compared to the immunosuppressive cytokine. In some embodiments, the second binding domain is IL-10 or variant thereof. In some embodiments, the second binding domain is TGF-β or variant thereof. In some embodiments, the second binding domain is an agonist antibody or antigen-binding fragment thereof (e.g., VH, VHH, scFv, Fab, full-length Ab). In some embodiments, the first binding domain is an antagonist antibody or antigen-binding fragment thereof (e.g., V_{H}, V_{H}H, scFv, Fab, full-length Ab). In some embodiments, the first binding domain is antagonist ligand or variant thereof. In some embodiments, the first binding domain is a variant of an antagonist ligand, and wherein the variant of the antagonist ligand has increased (e.g., increase at least about any of 10%, 20%, 30%, 40%, 50%, 60%, 70%, 80%, 90%, 100% or more) or decreased (e.g., decrease at least about any of 10%, 20%, 30%, 40%, 50%, 60%, 70%, 80%, 90%, or 100%) activity (e.g., binding affinity and/or biological activity) to the first target molecule compared to the antagonist ligand.

[0175] In some embodiments, the first target molecule and/or the second target molecule is an inhibitory immune cell surface receptor. In some embodiments, the inhibitory immune cell surface receptor is selected from the group consisting of CD5, NKG2A, NKG2B, KLRG1, FCRL4, Siglec2, CD72, CD244, GP49B, Lair-1, PirB, PECAM-1, CD200R, ILT2, and KIR2DL. In some embodiments, the second binding domain is an agonist antibody or antigen-binding fragment thereof (e.g., VH, VHH, scFv, Fab, full-length Ab). In some embodiments, the second binding domain is an agonist ligand or variant thereof. In some embodiments, the second binding domain is a variant of an agonist ligand, wherein the variant of the agonist ligand has increased (e.g., increase at least about any of 10%, 20%, 30%, 40%, 50%, 60%, 70%, 80%, 90%, 100% or more) or decreased (e.g., decrease at least about any of 10%, 20%, 30%, 40%, 50%, 60%, 70%, 80%, 90%, or 100%) activity (e.g., binding affinity and/or biological activity) to the second target molecule compared to the agonist ligand. In some embodiments, the first binding domain is an antagonist antibody or antigen-binding fragment thereof (e.g., VH, VHH, scFv, Fab, full-length Ab, such as blocks or reduces NKG2B signaling). In some embodiments, the first binding domain is an antagonist ligand or variant thereof. In some embodiments, the first binding domain is a variant of an antagonist ligand, and wherein the variant of the antagonist ligand has increased (e.g., increase at least about any of 10%, 20%, 30%, 40%, 50%, 60%, 70%, 80%, 90%, 100% or more) or decreased (e.g., decrease at least about any of 10%, 20%, 30%, 40%, 50%, 60%, 70%, 80%, 90%, or 100%) activity (e.g., binding affinity and/or biological activity) to the first target molecule compared to the antagonist ligand.

[0176] In some embodiments, the first binding domain is IL-12 or variant thereof, and the second binding domain is an agonist antibody or antigen-binding fragment thereof (e.g., VH, VHH, scFv, Fab, full-length Ab) specifically recognizing PD-1. Such immunomodulatory molecule is hereinafter also referred to as “IL-12/anti-PD-1 agonist Ab.” In some embodiments, the first binding domain is IL-12 or variant thereof, and wherein the second binding domain is PD-L1 (or extracellular domain thereof) or variant thereof. Such immunomodulatory molecule is hereinafter also referred to as “IL-12/PD-L1 immunomodulatory molecule” or “IL-12/PD-L1 immunocytokine.” In some embodiments, the second binding domain is a variant of PD-L1, and wherein the variant of PD-L1 has increased (e.g., increase at least about any of 10%, 20%, 30%, 40%, 50%, 60%, 70%, 80%, 90%, 100% or more) or decreased (e.g., decrease at least about any of 10%, 20%, 30%, 40%, 50%, 60%, 70%, 80%, 90%, or 100%) activity (e.g., binding affinity and/or biological activity) to PD-1 compared to a wild-type PD-L1. In some embodiments, the first binding domain is IL-12 or variant thereof, and wherein the second binding domain is PD-L2 (or extracellular domain thereof) or variant thereof. Such immunomodulatory molecule is hereinafter also referred to as “IL-12/PD-L2 immunomodulatory molecule” or “IL-12/PD-L2 immunocytokine.” In some embodiments, the second binding domain is a variant of PD-L2, and wherein the variant of PD-L2 has increased (e.g., increase at least about any of 10%, 20%, 30%, 40%, 50%, 60%, 70%, 80%, 90%, 100% or more) or decreased (e.g., decrease at least about any of 10%, 20%, 30%, 40%, 50%, 60%, 70%, 80%, 90%, or 100%) activity (e.g., binding affinity and/or biological activity) to PD-1 compared to a wild-type PD-L2. In some embodiments, the first binding domain is an IL-12 variant, wherein the TL-12 variant has increased (e.g., increase at least about any of 10%, 20%, 30%, 40%, 50%, 60%, 70%, 80%, 90%, 100% or more) or decreased (e.g., decrease at least about any of 10%, 20%, 30%, 40%, 50%, 60%, 70%, 80%, 90%, or 100%) activity (e.g., binding affinity and/or biological activity) to IL-12 receptor compared to a wild-type IL-12.

[0177] In some embodiments, the first binding domain is IL-2 or variant thereof, and the second binding domain is an agonist antibody or antigen-binding fragment thereof (e.g., VH, VHH, scFv, Fab, full-length Ab) specifically recognizing PD-1. Such immunomodulatory molecule is hereinafter also referred to as “IL-2/anti-PD-1 agonist Ab.” In some embodiments, the first binding domain is IL-2 or variant thereof, and wherein the second binding domain is PD-L1 (or extracellular domain thereof) or variant thereof. Such immunomodulatory molecule is hereinafter also referred to as “IL-2/PD-L1 immunomodulatory molecule” or “IL-2/PD-L1 immunocytokine.” In some embodiments, the second binding domain is a variant of PD-L1, and wherein the variant of PD-L1 has increased (e.g., increase at least about any of 10%, 20%, 30%, 40%, 50%, 60%, 70%, 80%, 90%, 100% or more) or decreased (e.g., decrease at least about any of 10%, 20%, 30%, 40%, 50%, 60%, 70%, 80%, 90%, or 100%) activity (e.g., binding affinity and/or biological activity) to PD-1 compared to a wild-type PD-L1. In some embodiments, the first binding domain is IL-2 or variant thereof, and wherein the second binding domain is PD-L2 (or extracellular domain thereof) or variant thereof. Such immunomodulatory molecule is hereinafter also referred to as “IL-2/PD-L2 immunomodulatory molecule” or “IL-2/PD-L2 immunocytokine.” In some embodiments, the second binding domain is a variant of PD-L2, and wherein the variant of PD-L2 has increased (e.g., increase at least about any of 10%, 20%, 30%, 40%, 50%, 60%, 70%, 80%, 90%, 10% or more) or decreased (e.g., decrease at least about any of 10%, 20%, 30%, 40%, 50%, 60%, 70%, 80%, 90%, or 100%) activity (e.g., binding affinity and/or biological activity) to PD-1 compared to a wild-type PD-L2. In some embodiments, the first binding domain is an IL-2 variant, wherein the IL-2 variant has increased (e.g., increase at least about any of 10%, 20%, 30%, 40%, 50%, 60%, 70%, 80%, 90%, 100% or more) or decreased (e.g., decrease at least about any of 10%, 20%, 30%, 40%, 50%, 60%, 70%, 80%, 90%, or 100%) activity (e.g., binding affinity and/or biological activity) to IL-2 receptor compared to a wild-type IL-2.

[0178] In some embodiments, the immunomodulatory molecule further comprises a third binding domain specifically recognizing a third target molecule. In some embodiments, the third binding domain and the second binding domain are the same. In some embodiments, the third binding domain and the second binding domain are different. In some embodiments, the third target molecule and the second target molecule are the same. In some embodiments, the third target molecule and the second target molecule are different.

[0179] In some embodiments, the target molecule is a cell surface molecule (e.g., extracellular domain of a receptor/ligand). In some embodiments, the target molecule acts as a cell surface marker on a target cell (e.g., immune cell) associated with a special disease state. The target molecules specifically recognized by the binding domains may be directly or indirectly involved in the diseases.

[0180] The binding domains described herein can be of any format known in the art or derived from any suitable antibodies or molecules. In some embodiments, the first binding domain is positioned at a hinge region between a second binding domain and an Fc domain subunit or portion thereof of the immunomodulatory molecule, and the second binding domain is in a format which ensures that the binding of the first binding domain (e.g., immunostimulatory cytokine moiety) to its first target molecule (e.g., cytokine receptor) is reduced in the absence of second target molecule binding of the second binding domain, for example, without second target molecule binding, reducing the activity (e.g., binding affinity to cytokine receptor and/or biological activity) of the first binding domain positioned at the hinge region to be no more than about 70% of that of a corresponding first binding domain (e.g., cytokine or variant thereof) in a free state. For example, the binding domain can be an antigen-binding fragment selected from an scFv, a VH, a VL, an scFv-scFv, an Fv, a Fab, a Fab′, a (Fab′)2, a minibody, a diabody, a domain antibody variant (dAb), a single domain antibody (sdAb) such as a camelid antibody (VHH) or a V_{NAR}, a fibronectin 3 domain variant, an ankyrin repeat variant, and other target molecule-specific binding domains derived from other protein scaffolds. In some embodiments, the antigen-binding fragment is an scFv. In some embodiments, the antigen-binding fragment is a Fab. In some embodiments, the antigen-binding fragment is formed by a V_{H} from a first polypeptide chain and a V_{L} from a second polypeptide chain. In some embodiments, the antigen-binding fragment is human. In some embodiments, the antigen-binding fragment is humanized. In some embodiments, the antigen-binding fragment is chimeric. In some embodiments, the antigen-binding fragment is derived from a monoclonal antibody of mouse, rat, monkey, or rabbit, etc.

[0181] In some embodiments, the immunomodulatory molecule comprises two or more first binding domains (e.g., immunostimulatory cytokine moiety). In some embodiments, the immunomodulatory molecule comprises two or more second binding domains (e.g., PD-L1 or PD-L2 extracellular domain, or anti-PD-1 agonist Fab, scFv, sdAb, etc.). In some embodiments, the immunomodulatory molecule further comprises one or more third binding domains. In some embodiments, two or more first binding domains (e.g., antigen-binding fragments or cytokine moieties) are connected in tandem via optional linker(s). In some embodiments, the two or more first binding domains are on different antigen-binding polypeptides. In some embodiments, two or more second binding domains (e.g., antigen-binding fragments or cytokine moieties) are connected in tandem via optional linker(s). In some embodiments, the two or more second binding domains are on different antigen-binding polypeptides. In some embodiments, two or more third binding domains (e.g., antigen-binding fragments or cytokine moieties) are connected in tandem via optional linker(s). In some embodiments, the two or more third binding domains are on different antigen-binding polypeptides. In some embodiments, the two or more first binding domains are the same. In some embodiments, the two or more first binding domains are different. In some embodiments, the target molecule epitopes specifically recognized by the two or more first binding domains are the same. In some embodiments, the target molecule epitopes specifically recognized by the two or more first binding domains are different. In some embodiments, the two or more second binding domains are the same. In some embodiments, the two or more second binding domains are different. In some embodiments, the target molecule epitopes specifically recognized by the two or more second binding domains are the same. In some embodiments, the target molecule epitopes specifically recognized by the two or more second binding domains are different. In some embodiments, the two or more third binding domains are the same. In some embodiments, the two or more third binding domains are different. In some embodiments, the target molecule epitopes specifically recognized by the two or more third binding domains are the same. In some embodiments, the target molecule epitopes specifically recognized by the two or more third binding domains are different. For example, in some embodiments, the immunomodulatory molecule comprises from N′ to C′: Fab1-optional linker1-Fab2-optional linker2-(optional hinge or portion thereof-first binding domain (e.g., immunostimulatory cytokine moiety)-optional hinge or portion thereof)-Fc subunit. For example, CH1 or CL of Fab1 is linked to VH or VL of Fab2 via the optional linker 1. In some embodiments, the immunomodulatory molecule comprises from N′ to C′: scFv1 (or sdAb1)-optional linker1-scFv2 (or sdAb2)-optional linker 2-(optional hinge or portion thereof-first binding domain (e.g., immunostimulatory cytokine moiety)-optional hinge or portion thereof)-Fc subunit. In some embodiments, the immunomodulatory molecule comprises from N′ to C′: ligand1 (e.g., PD-L2)-optional linker1-ligand2 (e.g., PD-L2)-optional linker 2-(optional hinge or portion thereof-first binding domain (e.g., immunostimulatory cytokine moiety)-optional hinge or portion thereof)-Fc subunit. The first binding domain (e.g., immunostimulatory cytokine moiety) in parenthesis can be absent for the other pairing immunomodulatory molecule chain. For example, the immunomodulatory molecule can comprise a first polypeptide chain comprising from N′ to C′: scFv1 (or sdAb1)-optional linker1-scFv2 (or sdAb2)-optional linker2-first binding domain (e.g., immunostimulatory cytokine moiety)-hinge or portion thereof-Fc subunit1; and a second polypeptide chain from N′ to C′: scFv3 (or sdAb3)-optional linker3-scFv4 (or sdAb4)-optional linker4-hinge or portion thereof-Fc subunit2.

[0182] Binding affinity of a binding domain (e.g., scFv, Fab, VHH, ligand, or receptor) and its target molecule can be determined experimentally by any suitable antibody/antigen binding assays or other protein binding assays (e.g., ligand-receptor binding) known in the art, e.g., Western blots, ELISA, MSD electrochemiluminescence, bead based MIA, RIA, SPR, ECL, IRMA, EIA, Biacore assay, Octet analysis, peptide scans, FACS, etc. Also see “binding affinity” subsection below for exemplary methods. In some embodiments, the Kd of the binding between the antibody or antigen-binding fragment and its target molecule is about any of ≤10⁻⁵ M, ≤10⁻⁶ M, ≤10⁻⁷ M, ≤10⁻⁸ M, ≤10⁻⁹ M, ≤10⁻¹⁰ M, ≤10⁻¹¹ M, or ≤10⁻¹² M.

[0183] Amino acid sequence variants of an antigen-binding protein or binding domain (e.g., antigen-binding fragment) may be prepared by introducing appropriate modifications into the nucleic acid sequence encoding the antigen-binding protein or binding domain, or by peptide synthesis. Such modifications include, for example, deletions from, and/or insertions into and/or substitutions of residues within the amino acid sequences of the antigen-binding protein or binding domain. Any combination of deletion, insertion, and substitution can be made to arrive at the final construct, provided that the final construct possesses the desired characteristics, e.g., target molecule-binding.

[0184] In some embodiments, the antigen-binding protein (e.g., antibody or ligand/receptor-hinge-Fc fusion protein) or binding domain (e.g., scFv, Fab, VHH, ligand, or receptor) has one or more amino acid substitutions. Sites of interest for substitutional mutagenesis include the HVRs (or CDRs) and FRs of antibodies or antigen-binding fragments. Conservative substitutions are shown in Table B under the heading of “Preferred substitutions.” More substantial changes are provided in Table B under the heading of “exemplary substitutions,” and as further described below in reference to amino acid side chain classes. Amino acid substitutions may be introduced into a binding domain of interest and the products screened for a desired activity, e.g., retained/improved target molecule binding, decreased immunogenicity.

TABLE B
Amino acid substitutions

| Original | Exemplary | Preferred | Original | | Preferred |
|---|---|---|---|---|---|
| Residue | Substitutions | Substitutions | Residue | Exemplary Substitutions | Substitutions |
| Ala (A) | Val; Leu; Ile | Val | Leu (L) | Norleucine; Ile; Val; Met; | Ile |
| | | | | Ala; Phe | |
| Arg (R) | Lys; Gln; Asn | Lys | Lys (K) | Arg; Gln; Asn | Arg |
| Asn (N) | Gln; His; Asp, | Gln | Met (M) | Leu; Phe; Ile | Leu |
| | Lys; Arg | | | | |
| Asp (D) | Glu; Asn | Glu | Phe (F) | Trp; Leu; Val; Ile; Ala; Tyr | Tyr |
| Cys (C) | Ser; Ala | Ser | Pro (P) | Ala | Ala |
| Gln (Q) | Asn; Glu | Asn | Ser (S) | Thr | Thr |
| Glu (E) | Asp: Gln | Asp | Thr (T) | Val; Ser | Ser |
| Gly (G) | Ala | Ala | Trp (W) | Tyr; Phe | Tyr |
| His (H) | Asn; Gln; Lys; | Arg | Tyr (Y) | Trp; Phe; Thr; Ser | Phe |
| | Arg | | | | |
| Ile (I) | Leu; Val; Met; | Leu | Val (V) | Ile; Leu; Met; Phe; Ala; | Leu |
| | Ala; Phe; | | | Norleucine | |
| | Norleucine | | | | |

[0185] Amino acids may be grouped according to common side-chain properties: (1) hydrophobic: Norleucine, Met, Ala, Val, Leu, Ile; (2) neutral hydrophilic: Cys, Ser, Thr, Asn, Gln; (3) acidic: Asp, Glu; (4) basic: His, Lys, Arg; (5) residues that influence chain orientation: Gly, Pro; and (6) aromatic: Trp, Tyr, Phe. Non-conservative substitutions will entail exchanging a member of one of these classes for another class.

[0186] One type of substitutional variant involves substituting one or more HVR residues of a parent antibody or antigen-binding fragment thereof. Generally, the resulting variant(s) selected for further study will have modifications (e.g., improvements) in certain biological properties (e.g., increased affinity, reduced immunogenicity) relative to the parent antibody or antigen-binding fragment thereof, and/or will have substantially retained certain biological properties of the parent antibody or antigen-binding fragment thereof. An exemplary substitutional variant is an affinity-matured antibody, which may be conveniently generated, e.g., using phage display-based affinity maturation techniques such as those described herein. Briefly, one or more HVR residues are mutated and the variant antibodies displayed on phage and screened for a particular biological activity (e.g., binding affinity).

[0187] In some embodiments, substitutions, insertions, or deletions may occur within one or more HVRs so long as such alterations do not substantially reduce the ability of the antibody or antigen-binding fragment thereof to bind antigen. For example, conservative alterations (e.g., conservative substitutions as provided herein) that do not substantially reduce binding affinity may be made in HVRs. Such alterations may be outside of HVR “hotspots” or CDRs.

[0188] Alterations (e.g., substitutions) may be made in HVRs, e.g., to improve antibody affinity. Such alterations may be made in HVR “hotspots,” i.e., residues encoded by codons that undergo mutation at high frequency during the somatic maturation process (see, e.g., Chowdhury, Methods Mol. Biol. 207:179-196 (2008)), and/or SDRs (a-CDRs), with the resulting variant VH or VL being tested for binding affinity. Affinity maturation by constructing and reselecting from secondary libraries has been described, e.g., in Hoogenboom et al. in Methods in Molecular Biology 178:1-37 (O'Brien et al., ed., Human Press, Totowa, NJ, (2001)). In some embodiments of affinity maturation, diversity is introduced into the variable genes chosen for maturation by any of a variety of methods (e.g., error-prone PCR, chain shuffling, or oligonucleotide-directed mutagenesis). A secondary library is then created. The library is then screened to identify any antibody variants with the desired affinity. Another method to introduce diversity involves HVR-directed approaches, in which several HVR residues (e.g., 4-6 residues at a time) are randomized. HVR residues involved in antigen binding may be specifically identified, e.g., using alanine scanning mutagenesis or modeling. CDR-H3 and CDR-L3 in particular are often targeted.

[0189] A useful method for identification of residues or regions of an antibody that may be targeted for mutagenesis is called “alanine scanning mutagenesis” as described by Cunningham and Wells (1989) Science, 244:1081-1085. In this method, a residue or group of target residues (e.g., charged residues such as Arg, Asp, His, Lys, and Glu) are identified and replaced by a neutral or negatively charged amino acid (e.g., alanine or polyalanine) to determine whether the interaction of the antibody with antigen is affected. Further substitutions may be introduced at the amino acid locations demonstrating functional sensitivity to the initial substitutions. Alternatively, or additionally, a crystal structure of an antigen-antibody complex to identify contact points between the antibody and antigen. Such contact residues and neighboring residues may be targeted or eliminated as candidates for substitution. Variants may be screened to determine whether they contain the desired properties.

[0190] In some embodiments, the first binding domain is an immunostimulatory cytokine moiety or variant thereof, such as any of the cytokine moieties described herein (for example, any of SEQ ID NOs: 26-30, 41, 63-65, and 140). In some embodiments, the immunostimulatory cytokine moiety or variant thereof is selected from the group consisting of IL-1, IL-2, IL-3, IL-4, IL-5, IL-6, IL-7, IL-8, IL-9, IL-12, IL-15, IL-17, IL-18, IL-21, IL-22, IL-23, IL-27, IFN-α, IFN-β, IFN-γ, TNF-α G-CSF, M-CSF, SCF, and GM-CSF. In some embodiments, the first binding domain is an agonist antibody against T cell surface antigen, including but not limited to, CD3s, CD3δ, or CD3γ; or CD2, CD4, CD8, CD27, CD28, CD40, CD134, CD137, and CD278. In some embodiments, the first binding domain is an agonist antibody against NK cell surface antigen, including but not limited to, CD16a, CD56 (NCAM), NKp46, NKp44, CD244, CD226, TIGIT, CD96, LAG3, TIM3, PD-1, KLRG1, CD161, CD94/NKG2, KIR, NKG2D, and NKp30. In some embodiments, the first binding domain is an agonist antibody against any of CD27, CD28, CD137, OX40, GITR, and HVEM. In some embodiments, the first binding domain is an agonist ligand, such as CD80, CD86, or 4-1BB.

[0191] In some embodiments, the second binding domain is an agonist antibody against an inhibitory checkpoint molecule, such as PD-1, TIGIT, or CTLT-4. In some embodiments, the second binding domain is a ligand of an inhibitory checkpoint molecule, such as PD-L1, PD-L2, CD155, or variant thereof. In some embodiments, the second binding domain comprises the sequence of any of SEQ ID NOs: 106-110, 121-128, and 137.

[0192] In some embodiments, the third binding domain is an antibody (agonist, antagonist, or neutral) against T cell surface antigen, including but not limited to, CD3e, CD36, or CD37; or CD2, CD4, CD8, CD27, CD28, CD40, CD134, CD137, and CD278. In some embodiments, the third binding domain is an antibody (agonist, antagonist, or neutral) against NK cell surface antigen, including but not limited to, CD16a, CD56 (NCAM), NKp46, NKp44, CD244, CD226, TIGIT, CD96, LAG3, TIM3, PD-1, KLRG1, CD161, CD94/NKG2, KIR, NKG2D, and NKp30. In some embodiments, the third binding domain is an antibody (agonist, antagonist, or neutral) against T cell exhausted marker, including but not limited to PD-1, TIGIT, CTLA-4, LAG3, and TIM3. In some embodiments, the third binding domain is an antibody (agonist, antagonist, or neutral) against tumor antigen, including but not limited to Her2, Her3, CEA, Trop2, CLDN18.2. In some embodiments, the third binding domain is a ligand to an immune cell surface antigen (e.g., PD-1 or TIGIT as the antigen), such as PD-L1, PD-L2, CD155, or variant thereof. In some embodiments, the third binding domain comprises the sequence of any of SEQ ID NOs. 106-110, 121-128, and 137.

### Cytokines or Variants Thereof

[0193] Cytokines (also referred to as “cytokine molecule” or “cytokine protein” interchangeably) are secreted proteins that modulate the activity of cells of the immune system. Examples of cytokines include the interleukins, interferons, chemokines, lymphokines, tumor necrosis factors, colony-stimulating factors for immune cell precursors, and so on. In some embodiments, the cytokine is a wildtype cytokine. In some embodiments, the cytokine is a naturally existing cytokine species variant. In some embodiments, the cytokine is a naturally existing cytokine subtype. A “cytokine variant” herein refers to any cytokine molecule that is not naturally existing, such as a cytokine active fragment (e.g., a cytokine fragment that retains at least about 10% biological activity or cytokine receptor binding activity of a full-length cytokine), a mutant, or a derivative thereof. A “cytokine or variant thereof” is also interchangeably referred to herein as a “cytokine moiety,” which can be a cytokine molecule, or a species variant, subtype, active fragment, mutant, or derivative thereof.

[0194] As used herein, “heterodimeric cytokine” or “cytokine heterodimer” refers to a cytokine consisting of two distinct protein subunits. At present, IL-12 family (includes IL-12, IL-23, IL-27, and IL-35) is the only naturally occurring heterodimeric cytokine family that is known. However, artificial heterodimeric cytokines can be constructed. For example, IL-6 and a soluble fragment of IL-6R can be combined to form a heterodimeric cytokine, as can CNTF and CNTF-R alpha (Trinchieri (1994) Blood 84:4008). “Homodimeric cytokine” or “cytokine homodimer” herein refers to a cytokine consisting of two identical protein subunits, such as IFN-γ or IL-10. “Monomeric cytokine” or “cytokine monomer” refers to a cytokine that consists of one unit of cytokine molecule. In some embodiments, the cytokine or variant thereof is a monomeric cytokine or variant thereof. In some embodiments, the cytokine or variant thereof is a homodimeric cytokine or variant thereof. In some embodiments, the cytokine or variant thereof is a heterodimeric cytokine or variant thereof.

[0195] In some embodiments, the cytokine moiety is a full-length cytokine molecule. In some embodiments, the cytokine moiety is a functional fragment of the cytokine molecule that is capable of producing some (e.g., at least about 10%, 20%, 30%, 40%, 50%, 60%, 70%, 80%, 90%, or 95%) or full biological activity and/or cytokine receptor binding activity of a full-length cytokine molecule. In some embodiments, the cytokine moiety is a precursor cytokine molecule. In some embodiments, the cytokine moiety is a mature cytokine molecule (e.g., no signal peptide). In some embodiments, the cytokine moiety is a wild-type cytokine. In some embodiments, the cytokine moiety is a naturally existing cytokine species variant. In some embodiments, the cytokine moiety is a naturally existing cytokine subtype. In some embodiments, the cytokine moiety is a cytokine variant, such as a mutant cytokine capable of producing some (e.g., at least about 10%, 20%, 30%, 40%, 50%, 60%, 70%, 80%, 90%, or 95%) or full biological activity and/or cytokine receptor binding activity of a wild-type cytokine. In some embodiments, the cytokine variant is a modified cytokine, such as glycosylated cytokine. The cytokine or variant thereof described herein can be a cytokine isolated from a variety of sources, such as from human tissue types or from another source, or prepared by recombinant or synthetic methods. In some embodiments, the cytokine moiety is a recombinant cytokine. In some embodiments, the cytokine moiety described herein can be a cytokine derived from any organism, such as mammals, including, but are not limited to, livestock animals (e.g., cows, sheep, goats, cats, dogs, donkeys, and horses), primates (e.g., human and non-human primates such as monkeys or chimpanzees), rabbits, and rodents (e.g., mice, rats, gerbils, and hamsters). In some embodiments, the cytokine moiety is a human cytokine, such as recombinant human cytokine. In some embodiments, the cytokine moiety is a murine cytokine, such as recombinant murine cytokine. In some embodiments, the cytokine moiety is a mature human cytokine. In some embodiments, the cytokine moiety comprises a signal peptide at the N-terminus of the cytokine molecule, the signal peptide is either from a different molecule or from the same cytokine molecule.

[0196] Cytokine variants can be of truncated versions, post-translationally modified versions, hybrid variants, peptide mimetics, biologically active fragments, deletion variants, substitution variants, or addition variants that maintain at least some degree (e.g., at least about 100%) of the parental cytokine activity (cytokine receptor binding activity and/or biological activity). “Parental cytokine” or “parent cytokine” described herein refers to the cytokine reference sequence from which the cytokine variant is engineered, modified, or derived from.

[0197] When immunomodulatory molecule of the subject invention is described to contain two or more different cytokines (and optionally including additional protein moieties), it means that the immunomodulatory molecule contains two or more different cytokine molecules (rather than two or more different cytokine subunits). For example, a homodimeric cytokine (e.g. IFN-α, IFN-β, IFN-γ, IL-5, IL-8, or the like) is referred to herein a single cytokine molecule. For example, an immunomodulatory molecule comprising two IL-5 monomers/subunits (either on the same polypeptide chain as a single-chain fusion or on different polypeptide chains), is considered to contain only one cytokine molecule, i.e., IL-5. Similarly, a heterodimeric cytokine such as IL-12, although it contains different subunits, is a single cytokine. For example, an immunomodulatory molecule comprising a p35 subunit and a p40 subunit (either on the same polypeptide chain as a single-chain fusion or on different polypeptide chains), is considered to contain only one cytokine molecule, i.e., IL-12. Furthermore, a heterodimeric form of normally homodimeric cytokines, such as a MCP-1/MCP-2 heterodimer, or of two alleles of a normally homodimeric cytokine (e.g., Zhang, J. Biol. Chem. [1994] 269:15918-24) is a single cytokine. In some embodiments, the cytokine subunit (e.g., p35 of IL-12) on one polypeptide chain of an immunomodulatory molecule can dimerize with the pairing cytokine subunit (e.g., p40) either on the same polypeptide chain or on a different polypeptide chain within the same immunomodulatory molecule. In some embodiments, the cytokine subunit (e.g., p35 of IL-12) of an immunomodulatory molecule can dimerize with the pairing cytokine subunit (e.g., p40) of a nearby immunomodulatory molecule.

[0198] In some embodiments, the cytokine variant comprises a mutation or modification (e.g., post-translational modification) that results in selectivity against a first type of receptor (e.g., trimeric receptor, or higher affinity receptor) versus a second type of receptor of the corresponding cytokine molecule (e.g., dimeric receptor, or weaker affinity receptor), measured as a ratio of activation of cells expressing the first type of receptor relative to activation of cells expressing the second type of receptor. For example, in some embodiments, the cytokine variant is a mutant IL-2 (or post-translationally modified IL-2), which binds IL-2Rβγ with stronger affinity (e.g., at least about any of 2, 3, 4, 5, 6, 7, 8, 9, or 10-fold stronger affinity) compared to IL-2Rαβγ, or activates cells expressing IL-2Rβγ more than (e.g., at least about any of 2, 3, 4, 5, 6, 7, 8, 9, or 10-fold activation) those expressing IL-2Rαβγ; or vice versa. In some embodiments, depending on the disease types to be treated, the preferred mutations or alterations increase cytokine moiety's activation of immune effector cells (e.g., CD8+ T cells for treating cancer). For example, in some embodiments, the IL-2 variant has a mutation (or post-translationally modification) that reduces the IL-2 variant's activation of cells expressing IL-2Rβγ receptor relative to the IL-2 variant's activation of cells expressing IL-2Rαβγ receptor.

[0199] In some embodiments, the mutation or modification of the cytokine variant leads to a differential effect (e.g., such as reduced binding or cell activation), compared to an immunomodulatory molecule without mutation or modification to such cytokine moiety. In one aspect, the differential effect is measured by the proliferative response of cells or cell lines that depend on the cytokine (e.g., IL-2) for growth. This response to the immunomodulatory molecule is expressed as an EC50 value, which is obtained from plotting a dose response curve and determining the protein concentration that results in a half-maximal response. In some embodiments, the ratio of the EC50 values obtained for cells expressing the first receptor type (e.g., IL-2Rβγ receptor) to cells expressing the second receptor type (e.g., IL-2Rαβγ receptor) for an immunomodulatory molecule of the invention (e.g., IL-2 variant immunomodulatory molecule) relative to the ratio of EC50 values for a reference immunomodulatory molecule (e.g., IL-2 wildtype immunomodulatory molecule of the same configuration) gives a measure of the differential effect for the immunomodulatory molecule. In some embodiments, the EC50 value obtained for an immunomodulatory molecule of the invention (e.g., IL-2 variant immunomodulatory molecule) relative to the EC50 value for a reference immunomodulatory molecule (e.g., IL-2 wildtype immunomodulatory molecule of the same configuration) gives a measure of the differential effect for the immunomodulatory molecule.

[0200] In some embodiments, the cytokine variant includes a mutation in one or more amino acids of the parental cytokine molecule (e.g., mature wildtype cytokine). In one embodiment, the cytokine variant includes an amino acid substitution at one or more amino acid positions in the cytokine. In another embodiment, the cytokine variant includes deletions or insertions of amino acids at one or more amino acid positions in the cytokine. In some embodiments, the cytokine variant includes modifications of one or more amino acids in the cytokine.

[0201] In some embodiments, the cytokine or variant thereof is selected from the group consisting of IL-1, IL-2, IL-3, IL-4, IL-5, IL-6, IL-7, IL-8, IL-9, IL-10, IL-12, IL-15, IL-17, IL-18, IL-21, IL-22, IL-23, IL-27, IL-35, IFN-α, IFN-β, IFN-γ, TNF-α, TGF-β, VEGF, erythropoietin, thrombopoietin, G-CSF, M-CSF, SCF, and GM-CSF, or natural variants or subtypes thereof. In some embodiments, the cytokine or variant thereof is an anti-inflammatory or immunosuppressive cytokine or variant thereof, such as IL-1Ra, IL-4, IL-5, IL-6, IL-10, IL-11, IL-13, IL-27, IL-33, IL-35, IL-37, IL-39, IFN-α, LIF, or TGF-β. In some embodiments, the cytokine or variant thereof is a pro-inflammatory or immunostimulatory cytokine or variant thereof, such as IL-1, IL-2, IL-3, IL-4, IL-5, IL-6, IL-7, IL-8, IL-9, IL-12, IL-15, IL-17, IL-18, IL-21, IL-22, IL-23, IL-27, IFN-α, IFN-β, IFN-γ, TNF-α, erythropoietin, thrombopoietin, G-CSF, M-CSF, SCF, or GM-CSF, or variant or subtype thereof. In some embodiments, the cytokine or variant thereof is selected from the group consisting of IL-2, IL-10, IL-12, IL-23, IFN-α (e.g., IFN-α2 or IFN-α2b), IFN-β, and IFN-γ. In some embodiments, the immunostimulatory cytokine is IL-12, and the cytokine subunits are p35 and p40. In some embodiments, the immunostimulatory cytokine is IL-23, and the cytokine subunits are p40 and p19. In some embodiments, the cytokine is LL-27, and the cytokine subunits are Epstein-Barr virus-induced gene 3 (EB13) and IL-27p28. In some embodiments, the immunosuppressive cytokine is IL-35, and the cytokine subunits are IL-12α (p35) and IL-27β. In some embodiments, the cytokine variant is a single chain fusion of two or more subunits from different cytokines.

### IL-2

[0202] In some embodiments, the immunostimulatory cytokine or variant thereof is IL-2 or variant thereof. Interleukin-2 (IL-2), also known as T cell growth factor (TCGF), is a 15.5 kDa monomeric protein that plays a key role in lymphocyte generation, survival, and homeostasis. It is involved in body's natural response to microbial infection and discriminating between “self” and “non-self.” IL-2 is an interleukin, it belongs to a cytokine family that includes IL-4, IL-7, IL-9, IL-15, and IL-21. IL-2 mediates its effects by binding to IL-2 receptors (IL-2R) expressed on lymphocytes. Activated CD4⁺ T cells and activated CD8⁺ T cells are the major sources of IL-2. Its ability to expand lymphocyte populations and increase effector functions of these cells makes IL-2 an attractive therapy against cancer. IL-2 has been suggested for treating acute myeloid leukemia (AML), non-Hodgkin's lymphoma (NHL), cutaneous T-cell lymphoma (CTCL), breast cancer, and bladder cancer.

[0203] IL-2 receptor (IL-2R) is a complex consisting of three chains, α (CD25, p55), β (CD122, p75), and γ (CD132, p65). The γ chain is shared by all IL-2 cytokine family members. IL-2 binding to either intermediate-affinity dimeric CD122/CD132 IL-2R (IL-2Rβγ, Kd˜10⁻⁹ M) or high-affinity trimeric CD25/CD122/CD132 IL-2R (IL-2Rαβγ, Kd˜10⁻¹¹ M) can lead to signal transduction, while binding to CD25 alone cannot. The β chain is complexed with Janus kinase 1 (JAK1). The γ chain is complexed with JAK3. Upon IL-2 binding to IL-2R, JAK1 and JAK3 are activated and capable of adding phosphate groups to molecules, thus initiating three intracellular signaling pathways: the MAP kinase pathway, the Phosphoinositide 3-kinase (PI3K) pathway, and the JAK-STAT pathway. Dimeric IL-2Rβγ is expressed by memory CD8⁺ T cells, NK cells, and B cells, whereas high levels of trimeric IL-2Rαβγ is expressed by regulatory T cells (Tregs) and activated T cells.

[0204] Aldesleukin (Proleukin®), recombinant human IL-2, was the first cancer immunotherapy, and one of the first recombinant proteins, approved by the FDA in 1992. Currently, Aldesleukin is used for the treatment of metastatic renal cell carcinoma (mRCC) and metastatic melanoma (mM) by IV infusion. Due to the requirement of frequent intravenous infusion over multiple doses, administration of Aldesleukin occurs within a clinical setting. Aldesleukin has demonstrated complete cancer regression in about 10% of patients treated for metastatic melanoma and renal cancer (Kapper et al., Cancer, 2008; Rosenberg, Sci Transl Med., 2012; Smith et al., Clin Cancer Res., 2008). Approximately 70% of patients with complete responses have been cured, maintaining complete regression for more than 25 years after initial treatment (Atkins et al., J Clin Oncol., 1999; Klapper et al., Cancer, 2008; Rosenberg, Sci Transl Med., 2012; Rosenberg et al., Ann Surg., 1998; Smith et al., Clin Cancer Res., 2008). However, high doses of IL-2 can induce vascular leak syndrome (VLS), tumor tolerance caused by activation-induced cell death (AICD), and immunosuppression caused by the activation of Tregs. An additional concern of systemic IL-2 treatment is related to severe side effects upon intravenous administration, which include severe cardiovascular, pulmonary edema, hepatic, gastrointestinal (GI), neurological, and hematological events (Proleukin (aldesleukin) Summary of Product Characteristics [SmPC]: http://www.medicines.org.uk/emc/medicine/19322/SPC). The severe side effects often restrict optimal IIL-2 dosing, which limits the number of patients who successfully respond to therapy. For more prevalent application in the future, toxicity and short half-life concerns of IL-2 need to be addressed.

[0205] Native human IL-2 precursor polypeptide consists of 153 amino acid residues (amino acids 1-20 are signal peptide), while the mature polypeptide consists of 133 amino acid residues (SEQ ID NO: 25). In some embodiments, the IL-2 moiety is a human mature IL-2. In some embodiments, the IL-2 moiety is a polypeptide substantially homologous to amino acid sequence of a wild-type human IL-2 (SEQ ID NO: 25), e.g., having at least about 85% (such as at least about any of 90°/%, 91%, 92%, 93%, 94%, 95%, 96%, 97%, 98%, 99%, or 100%) amino acid sequence identity to a wild-type human IL-2 (SEQ ID NO: 25). In some embodiments, the IL-2 moiety is not glycosylated. In some embodiments, the IL-2 moiety is glycosylated.

[0206] In some embodiments, the IL-2 moiety is (or consists essentially of) Aldesleukin (e.g., Proleukin®; see, e.g., https://www.drugbank.ca/drugs/DB00041). Aldesleukin (desalanyl-1, serine-125 human interleukin-2) is an antineoplastic (anticancer) biologic response modifier approved by the FDA. It has a molecular weight of approximately 15.3 kDa, and synonym recombinant interleukin-2 human, Interleukin-2 aldesleukin, 125-L-serine-2-133-interleukin 2 (human reduced), or Interleukin-2(2-133), 125-ser. Aldesleukin is a recombinant IL-2, it differs from native IL-2 in the following ways: a) Aldesleukin is not glycosylated because it is produced from E. coli; b) Aldesleukin has no N-terminal alanine (A); c) Aldesleukin has a cysteine to serine substitution at position 125 (C125S); and d) the aggregation state of Aldesleukin is likely different from that of native IL-2. Thus in some embodiments, the IL-2 variant comprises a cysteine to serine substitution at position 125 (C125S) from the human IL-2 mature form.

[0207] K. Sauvé et al. (Proc Natl Acad Sci USA. 1991: 88(11):4636-4640) found that amino acid residues K35, R38, F42, and K43 of wildtype IL-2 were found to be crucial for IL-2 receptor binding (IL-2Rα, low affinity form), and R38A and F24A mutations retained substantial IL-2 biological activity. R. Vazquez-Lombardi et al. (Nat Commun. 2017; 8:15373) discovered that R38D, K43E, and E61R mutations in IL-2 drove strong expansion of CD25⁻ cytotoxic subsets with minimal expansion of Tregs compared to wildtype IL-2. P65L mutation in IL-2 was found to have reduced systemic toxicity and greater antitumor efficacy compared to wildtype IL-2 (Chen et al., Cell Death Dis. 2018; 9(10):989).

[0208] In some embodiments, the IL-2 variant comprises one or more mutations at a position selected from the group consisting of L18, Q22, F24, K35, R38, F42, K43, E61, P65, Q126, and S130 relative to a wildtype IL-2 (SEQ ID NO: 25). In some embodiments, the IL-2 variant comprises one or more mutations selected from the group consisting of L18R, Q22E, F24A, R38D, K43E, E61R, P65L, Q126T, and S130R relative to a wildtype IL-2 (SEQ ID NO: 25). In some embodiments, the IL-2 variant comprises an R38D/K43E/E61R mutation relative to a wildtype IL-2 (SEQ ID NO: 25). In some embodiments, the IL-2 variant comprises the sequence of SEQ ID NO: 26. In some embodiments, the IL-2 variant comprises an L18R/Q22E/R38D/K43E/E61R mutation relative to SEQ ID NO: 25. In some embodiments, the IL-2 variant comprises the sequence of SEQ ID NO: 27. In some embodiments, the IL-2 variant comprises an R38D/K43E/E61R/Q126T mutation relative to SEQ ID NO: 25. In some embodiments, the IL-2 variant comprises the sequence of SEQ ID NO: 28. In some embodiments, the IL-2 variant comprises an L18R/Q22E/R38D/K43E/E61R/Q126T mutation relative to SEQ ID NO: 25. In some embodiments, the TL-2 variant comprises the sequence of SEQ ID NO: 29. In some embodiments, the IL-2 variant comprises an L18R/Q22E/R38D/K43E/E61R/Q126T/S130R mutation relative to SEQ ID NO: 25. In some embodiments, the IL-2 variant comprises the sequence of SEQ ID NO: 30.

### IFN-α

[0209] In some embodiments, the immunostimulatory cytokine or variant thereof is IFN-α or variant thereof, such as IFN-α2 or variant thereof, or IFN-α2b or variant thereof. Human type 1 interferons (IFNs) are a large group of IFNs that help regulate the activity of the immune system. They bind to a specific cell surface receptor complex known as the IFN-α receptor (IFNAR) consisting of IFNAR1 and IFNAR2 chains. Mammalian type I IFNs contain IFN-α, IFN-β, IFN-κ, IFN-δ, IFN-ε, IFN-τ, IFN-ω, and IFN-ζ (a.k.a. limitin).

[0210] IFN-α proteins are mainly produced by plasmacytoid dendritic cells (pDCs), and mainly involved in innate immunity against viral infection. IFN-α proteins are 19-26 kDa monomeric proteins that have been extensively used for the treatment of cancer and viral diseases, such as Hepatitis B and C. There are 13 genes responsible for synthesis of 13 IFN-α subtypes: IFNA1, IFNA2, IFNA4, IFNA5, IFNA6, IFNA7, IFNA8, IFNA10, IFNA13, IFNA14, IFNA16, IFNA17, IFNA21.

[0211] Human IFN-α2a, IFN-α2b, and IFN-α2c represent allelic variants of the same gene. IFN-α2a and IFN-α2b have a lysine and an arginine at position 23 of the mature protein, respectively. Human IFN-α2a and IFN-α2b are the only IFN-α subtypes with an O-glycosylation site (on Thr106). Interferon alfa-2a (IFN-α2a; marketed by Hoffmann-La Roche as Roferon-A®) and interferon alfa-2b (IFN-α2b, recombinant form of IFN-α2; marketed by Schering-Plough as Intron-A®) have been approved for the treatment of hairy cell leukemia, melanoma, follicular lymphoma, renal cell carcinoma, AIDS-related Kaposi's sarcoma, and chronic myelogenous leukemia (M. Ferrantini et al., Biochimie. June-July 2007; 89(6-7):884-893). Recent studies have underscored new immunomodulatory effects of IFN-α, including activities on T cells and dendritic cells, which may lead to generation of a durable antitumor response. However, the use of IFN-α in clinical oncology is still generally based on exploiting the anti-proliferative and anti-angiogenic activities of these cytokines. Full exploit of the role of IFN-α as a regulator of immune response and tumor immunity would require novel approaches in the use of these cytokines.

[0212] hIFN-α2b is a glycoprotein consisting of 166 amino acids with O-glycosylated threonine at position 106. Each rhIFN-2b consists of five a helices (called helix A to E) connected by a loop AB, BC, CD, and DE. Residues that are important in receptor binding are the AB loop (Arg22, Leu26, Phe27, Leu30, Lys31, Arg33, and His34), helix B (Ser68), helix C (Thr79, Lys83, Tyr85, and Tyr89), D helix (Arg120, lys121, Gln124, Lys131, and Glu132), and helix E (Arg144 and Glu146). Amino acid residues that are important in the biological activity are Leu30, Lys31, Arg33, His34, Phe36, Arg120, Lys121, Gln124, Tyr122, Tyr129, Lys131, Glu132, Arg144, and Glu146 (Ratih Asmana Ningrum, Scientifica (Cairo). 2014; 2014:970315).

[0213] In some embodiments, the IFN-α moiety is IFN-α2. In some embodiments, the IFN-α moiety is IFN-α2a. In some embodiments, the IFN-α moiety is IFN-α2b. In some embodiments, the IFN-α moiety is IFN-α2c. In some embodiments, the IFN-α moiety is a mature IFN-α. Native human IFN-α2b precursor polypeptide consists of 188 amino acid residues (amino acids 1-23 are signal peptide), while the mature polypeptide consists of 165 amino acid residues (SEQ ID NO: 31). In some embodiments, the IFN-α moiety is a polypeptide substantially homologous to a wild-type IFN-α (SEQ ID NO: 31), e.g., having at least about 85% (such as at least about any of 90%, 91%, 92%, 93%, 94%, 95%, 96%, 97%, 98%, 99%, or 100%) amino acid sequence identity to a wild-type IFN-α (SEQ ID NO: 31). In some embodiments, the IFN-α moiety is not glycosylated. In some embodiments, the IFN-α moiety is glycosylated.

[0214] In some embodiments, the IFN-α variant (e.g., IFN-α2b variant) comprises one or more mutations at a position selected from the group consisting of R22, L26, F27, L30, K31, D32, R33, H34, D35, F36, S68, T79, K83, Y85, Y89, R120, K121, Y122, Q124, Y129, K131, E132, R144, and E146 relative to an IFN-α (e.g., IFN-α2b; SEQ ID NO: 31). In some embodiments, the IFN-α variant (e.g., IFN-α2b variant) comprises one or more mutations selected from the group consisting of L30A, K31A, D32A, R33A, H34A, and D35A relative to an IFN-α (e.g., IFN-α2b; SEQ ID NO: 31). In some embodiments, the IFN-α variant (e.g., IFN-α2b variant) comprises an L30A mutation relative to an IFN-α (e.g., IFN-α2b; SEQ ID NO: 31). In some embodiments, the IFN-α variant comprises an amino acid sequence of SEQ ID NO: 32. In some embodiments, the IFN-α variant (e.g., IFN-α2b variant) comprises the sequence of any of SEQ ID NOs: 32-37.

### IFN-β

[0215] Two types of IFN-β have been described, IFN-β1 and IFN-β3. In some embodiments, the immunostimulatory cytokine or variant thereof is IFN-β or variant thereof, such as IFN-β1, IFN-β3, or variant thereof. In some embodiments, the immunostimulatory cytokine or variant thereof is IFN-β1a or variant thereof. In some embodiments, the IFN-γ moiety is a mature IFN-β. In some embodiments, the IFN-β moiety is a wildtype (e.g., wildtype human) IFN-β. In some embodiments, the IFN-β moiety is a mutant (e.g., mutant human) IFN-β. In some embodiments, the IFN-β moiety is not glycosylated. In some embodiments, the IFN-β moiety is glycosylated.

### IFN-γ

[0216] In some embodiments, the immunostimulatory cytokine or variant thereof is IFN-γ or variant thereof. Interferon gamma (IFNγ) is a disulfide-linked dimerized soluble cytokine that is the only member of the type II class of interferons. IFN-γ is a homodimer of −25 kDa with a tertiary fold built around an unusual pattern of interdigitating a helices. It is produced predominantly by T cells and NK cells in response to a variety of inflammatory or immune stimuli. IFN-γ can serve both as an immune system activator and suppressor. Studies showed that cancer immunotherapy (checkpoint inhibitors) acts partially through an increase of IFN-γ expression, leading to the elimination of cancer cells. Resistance to immunotherapy is attributed to defects in IFN-γ signaling. However, IFN-γ can also contribute to cancer evasion by promoting tumorigenesis and angiogenesis, eliciting expression of tolerant molecules such as PD-L1, and inducing homeostasis program. Due to its opposite and competing effects on the immune system, IFN-γ has not been approved by FDA to treat cancer patients except in the case of malignant osteoporosis (L. Ni and J. Lu, Cancer Med. 2018; 7(9):4509-4516).

[0217] Monomeric native human IFN-γ (hIFN-γ) pre-pro-polypeptide consists of 166 amino acid residues (amino acids 1-23 are signal peptide); the monomeric mature polypeptide consists of 138 amino acid residues (SEQ ID NO: 38), corresponding to amino acids 24-161 of the pre-pro-polypeptide; amino acids 162-166 are propeptide sequence of the pre-pro-polypeptide. In some embodiments, the monomeric IFN-γ moiety is a monomeric mature IFN-γ. In some embodiments, the monomeric IFN-γ moiety is a polypeptide substantially homologous to a wild-type IFN-γ (SEQ ID NO: 38), e.g., having at least about 85% (such as at least about any of 90%, 91%, 92%, 93%, 94%, 95%, 96%, 97%, 98%, 99%, or 100%) amino acid sequence identity to a wild-type IFN-γ (SEQ ID NO: 38). In some embodiments, the IFN-γ moiety (or subunit) is not glycosylated. In some embodiments, the IFN-γ moiety (or subunit) is glycosylated. In some embodiments, the IFN-γ moiety comprises two identical IFN-γ monomers/subunits. In some embodiments, the IFN-γ moiety comprises two different IFN-γ monomers/subunits. For example, in some embodiments, the IFN-γ moiety comprises one wildtype IFN-γ monomer and one IFN-γ variant monomer. In some embodiments, the IFN-γ moiety comprises two IFN-γ monomers (e.g., two IFN-γ variant or wildtype monomers) linked together, such as via a peptide linker (e.g., any of SEQ ID NOs: 227-229, 245, and 246) or a chemical linker.

[0218] IFN-γ amino acid residues S20, A23, H111, and Q115 are important for receptor binding; amino acid residues V5, S20, A23, G26, and H111 are important for IFN-γ biological activity (M. Randal and A. A. Kossiakoff, Structure. 2001; 9(2):155-63). Lander et al. (J Mol Biol. 2000; 299(1):169-79) developed a biologically active single chain variant of hIFN-γ (IFN-γSC1), by linking two monomeric IFN-γ with a 7-amino acid residue linker and changing His111 in the first IFN-γ monomer to an aspartic acid residue. Due to the H1 ID mutation, IFN-γSC1 can only bind one IFN-γRα but can fully retain its biological activity in cell proliferation, MHC class 1 induction, and anti-viral assays.

[0219] In some embodiments, the monomeric IFN-γ comprises the sequence of SEQ ID NO: 38. In some embodiments, the IFN-γ variant comprises one or more mutations within one or both IFN-γ subunits at a position selected from the group consisting of V5, S20, D21, V22, A23, D24, N25, G26, H111, and Q115 relative to a wildtype IFN-γ subunit (SEQ ID NO: 38). In some embodiments, the IFN-γ variant comprises one or more mutations within one or both IFN-γ subunits selected from the group consisting of S20A, D21A, D21K, V22A, A23S, A23E, A23Q, A23V, D24A, D24E, N25A, N25K, and H111ID relative to a wildtype IFN-γ subunit (SEQ ID NO: 38). In some embodiments, the IFN-γ variant comprises one or more mutations within one or both IFN-γ subunits selected from the group consisting of S20A/D21A, D21K, V22A/A23S, D24A/N25A, A23E/D24E/N25K, A23Q, and A23V relative to a wildtype IFN-γ subunit (SEQ ID NO: 38). In some embodiments, one or both subunits of the IFN-γ variant comprises the sequence of any of SEQ ID NOs: 39-45. In some embodiments, the IFN-γ variant comprises an A23V mutation within one or both IFN-γ subunits relative to a wildtype IFN-γ subunit (SEQ ID NO: 38). In some embodiments, the one or both subunits of the IFN-γ variant comprises the sequence of SEQ ID NO: 41. In some embodiments, the two subunits of the IFN-γ or variant thereof are connected by a linker (e.g., any of SEQ ID NOs: 227-229, 245, and 246). In some embodiments, the IFN-γ variant comprises the sequence of SEQ ID NO: 47 or 252. In some embodiments, both subunits of the IFN-γ comprises the sequence of SEQ ID NO: 38. In some embodiments, the IFN-γ moiety is a recombinant “wildtype” IFN-γ comprising two wildtype IFN-γ subunits connected by a linker (e.g., any of SEQ ID NOs: 227-229, 245, and 246), such as comprising the sequence of SEQ ID NO: 46 or 251.

### IL-10

[0220] In some embodiments, the immunosuppressive cytokine or variant thereof is IL-10 or variant thereof. Interleukin 10 (IL-10) is an α-helical cytokine that is expressed as a non-covalently linked homodimer of −37 kDa, also known as human cytokine synthesis inhibitory factor (CSIF). It plays a key role in the induction and maintenance of tolerance. IL-10 signals through a JAK-STAT complex. The IL-10 receptor (IL-10R) has two subunits, an a subunit that is primarily expressed on immune cells, particularly monocytes and macrophages with the highest expression, and an ubiquitously expressed β subunit. IL-10 is mainly produced by monocytes and, to a lesser extent, lymphocytes, including type-II T helper cells (TH2), mast cells, CD4⁺CD25⁺Foxp3-regulatory T cells, and subsets of activated T cells and B cells. Dendritic cells and NK cells can also produce IL-10. IL-10 suppresses the secretion of pro-inflammatory cytokines like TNFα, IL-1, IL-6, IL-12 as well as Th1 cytokines such as IL-2 and IFN-γ and controls differentiation and proliferation of macrophages, B-cells and T-cells (Glocker, E. O. et al., Ann. N.Y. Acad. Sci. 1246, 102-107 (2011); Moore, K. W. et al., Annu. Rev. Immunol. 19, 683-765 (2001); R. de Waal Malefyt et al., J. Erp. Med. 174, 915-924 (1991); Williams, L. M. et al., Immunology 113, 281-292 (2004)). Moreover, it is a potent inhibitor of antigen presentation, inhibiting MHC II expression as well as upregulation of co-stimulatory molecules CD80 and CD86 (Mosser, D. M. & Zhang, X. Immunological Reviews 226, 205-218 (2008)). If IL-10 is not present or not functional, inflammation cannot be controlled. This makes IL-10 an attractive therapeutic candidate for autoimmune diseases. However, clinical trials using IL-10 and the development of a recombinant IL-10 (ilodecakin, TENOVIL®, Schering-Plough Research Institute, Kenilworth, N.J.) have been discontinued due to lack of efficacy. Recent studies have shed light on IL-10's potential role in tumor treatment (Fujii et al., (October 2001). “Interleukin-10 promotes the maintenance of antitumor CD8(+) T-cell effector function in situ”. Blood. 98(7):2143-51).

[0221] Monomeric native human IL-10 precursor polypeptide consists of 178 amino acid residues (amino acids 1-18 are signal peptide), while the monomeric mature IL-10 polypeptide consists of 160 amino acid residues (SEQ ID NO: 52). In some embodiments, the monomeric IL-10 moiety is a monomeric mature IL-10. In some embodiments, the monomeric IL-10 moiety is a polypeptide substantially homologous to a wild-type IL-10 (SEQ ID NO: 52), e.g., having at least about 85% (such as at least about any of 90%, 91%, 92%, 93%, 94%, 95%, 96%, 97%, 98%, 99%, or 100%) amino acid sequence identity to a wild-type IL-10 (SEQ ID NO: 52). In some embodiments, the IL-10 moiety (or subunit) is not glycosylated. In some embodiments, the IL-10 moiety (or subunit) is glycosylated. In some embodiments, the IL-10 moiety comprises two identical IL-10 monomers/subunits. In some embodiments, the IL-10 moiety comprises two different IL-10 monomers/subunits. For example, in some embodiments, the IL-10 moiety comprises one wildtype IL-10 monomer and one IL-10 variant monomer. In some embodiments, the IL-10 moiety comprises two IL-10 monomers (e.g., two IL-10 variant or wildtype monomers) linked together, such as via a peptide linker (e.g., any of SEQ ID NOs: 227-229, 245, and 246) or a chemical linker, see e.g., a biologically active single chain IL-10 in US20130316404, the content of which is incorporated herein by reference in its entirety.

[0222] IL-10 amino acid residues N21, M22, R24, R32, H90, S31, and S93 are important in IL-10 receptor binding; residue R24 is crucial for IL-10 biological activity (Yoon et al., J Biol Chem. 2006; 281(46):35088-35096; E. S. Acuner-Ozbabacan et al. BMC Genomics. 2014; 15 Suppl 4(Suppl 4):S2).

[0223] In some embodiments, the monomeric IL-10 comprises the sequence of SEQ ID NO: 52. In some embodiments, the IL-10 variant comprises one or more mutations within one or both IL-10 subunits at a position selected from the group consisting of N21, M22, R24, D25, L26, R27, D28, A29, F30, S31, R32, H90, and S93 relative to a wildtype IL-10 subunit (SEQ ID NO: 52). In some embodiments, the IL-10 variant comprises one or more mutations within one or both IL-10 subunits selected from the group consisting of R24A, D25A, L26A, R27A, D28A, A29S, F30A, S31A, and R32A relative to a wildtype TL-10 subunit (SEQ ID NO: 52). In some embodiments, the IL-10 variant comprises one or more mutations within one or both IL-10 subunits selected from the group consisting of R24A, D25A/L26A, R27A, D28A/A29S, F30A/S31A, and R32A relative to a wildtype IL-10 subunit (SEQ ID NO: 52). In some embodiments, the one or both subunits of the IL-10 variant comprises the sequence of any of SEQ ID NOs: 53-58. In some embodiments, the IL-10 variant comprises an R27A mutation within one or both IL-10 subunits relative to a wildtype IL-10 subunit (SEQ ID NO: 52). In some embodiments, the one or both subunits of the IL-10 variant comprises the sequence of SEQ ID NO: 55. In some embodiments, the IL-10 variant comprises the sequence of SEQ ID NO: 60. In some embodiments, both subunits of IL-10 comprises the sequence of SEQ ID NO: 52. In some embodiments, the two subunits of the IL-10 or variant thereof are connected by a linker. In some embodiments, the IL-10 moiety is a recombinant “wildtype” IL-10 comprising two wildtype IL-10 monomers connected by a linker (e.g., any of SEQ ID NOs: 227-229, 245, and 246), such as comprising the sequence of SEQ ID NO: 59.

### IL-12

[0224] In some embodiments, the immunostimulatory cytokine or variant thereof is IL-12 or variant thereof. IL-12 is a 70 kDa heterodimeric protein consisting of two covalently (disulfide bond) linked p35 (IL-12A) and p40 (IL-12B) subunits. P40 subunit is shared between IL-12 and IL-23. The active heterodimer (referred to as “p70”), and a homodimer of p40 are formed following protein synthesis. IL-12 is an interleukin belonging to the IL-12 family, which is the only family comprising heterodimeric cytokines, including IL-12, IL-23, IL-27, and IL-35. IL-12 is produced by dendritic cells, macrophages, neutrophils, and human B-lymphoblastoid cells (NC-37) in response to antigenic stimulation. IL-12 functions by binding to the IL-12 receptor (IL-12R), which is a heterodimeric receptor formed by IL-12Rβ1 and IL-12Rβ2, and in turn leading to JAK-STAT pathway activation. IL-12 promotes the development of Th1 responses and greatly induces IFNγ production by T and NK cells. IL-12's ability to activate both innate (NK cells) and adaptive (cytotoxic T lymphocytes) immunities has made it a promising candidate for cancer immunotherapy. Despite positive results from animal trials, IL-12 has only showed modest anti-tumor responses in clinical trials and was often accompanied by significant issues with toxicity (Lasek et al., Cancer Immunol Immunother., 2014). Treatment with IL-12 was associated with systemic flu-like symptoms (fever, chills, fatigue, erythromelalgia, or headache) and toxic effects on the bone marrow and liver. Dosing studies showed that patients could only tolerate doses under 1 μg/kg, far below the therapeutic dose. The result is that clinical trials with IL-12—used either as monotherapy or combined with other agents—failed to demonstrate potent sustained therapeutic efficacy ((Lasek et al., Cancer Immunol Immunother., 2014).

[0225] Native human p35 (IL-12A) precursor polypeptide consists of 219 amino acid residues (amino acids 1-22 are signal peptide), while the mature polypeptide consists of 197 amino acid residues (SEQ ID NO: 61). Native human p40 (IL-12B) precursor polypeptide consists of 328 amino acid residues (amino acids 1-22 are signal peptide), while the mature polypeptide consists of 306 amino acid residues (SEQ ID NO: 62). In some embodiments, the IL-12 moiety (or IL-12 subunit) is a mature IL-12 (or mature subunit). In some embodiments, the IL-12A (p35) subunit or variant thereof is a polypeptide substantially homologous to amino acid sequence of a wild-type IL-12A (p35) (SEQ ID NO: 61), e.g., having at least about 85% (such as at least about any of 90°/%, 91%, 92%, 93%, 94%, 95%, 96%, 97%, 98%, 99%, or 100%) amino acid sequence identity to a wild-type IL-12A (p35) (SEQ ID NO: 61). In some embodiments, the IL-12B (p40) subunit or variant thereof is a polypeptide substantially homologous to amino acid sequence of a wild-type IL-12B (p40) subunit (SEQ ID NO: 62), e.g., having at least about 85% (such as at least about any of 90%, 91%, 92%, 93%, 94%, 95%, 96%, 97%, 98%, 99%, or 100%) amino acid sequence identity to a wild-type IL-12B (p40) subunit (SEQ ID NO: 62). In some embodiments, the IL-12 (or subunit) or variant thereof is not glycosylated. In some embodiments, the IL-12 (or subunit) or variant thereof is glycosylated. In some embodiments, the IL-12 variant comprises one wildtype subunit (e.g., wt p35) and one mutant subunit (e.g., variant p40). In some embodiments, the IL-12 variant comprises two variant subunits (p35 variant and p40 variant). In some embodiments, the IL-12 variant comprises two wildtype subunits (e.g., wt p35 and p40) that are linked together via a synthetic peptide linker (e.g., any of SEQ ID NOs: 227-229, 245, and 246) or a chemical linker.

[0226] Within the p40 subunit, amino acid residues that are important for IL-2 receptor binding are C177, E45, E59, and D62(Luo et al. J Mol Biol. 2010; 402(5):797-812). Studies suggested that an accessible N terminus of the p40 subunit is important for IL-12 bioactivity. Lieschke et al. constructed a single chain IL-12 (scIL-12) and noted that the order of the subunits affected IL-12 biologic activity: when the p35 subunit was at the N-terminus of p40 subunit, IL-12 activity greatly decreased; when p40 subunit was at the N-terminus of the p35 subunit, scIL-12 had biological activity comparable to rIL-12 (Lieschke et al. Nat Biotechnol. 1997; 15(1):35-40).

[0227] In some embodiments, the IL-12 moiety comprises a wildtype p35 subunit (SEQ ID NO: 61). In some embodiments, the IL-12 moiety comprises a variant p35 subunit. In some embodiments, the IL-12 moiety comprises a wildtype p40 subunit (SEQ ID NO: 62). In some embodiments, the IL-12 moiety comprises a variant p40 subunit. In some embodiments, the IL-12 moiety comprises a wildtype or variant p35 subunit and a wildtype or variant p40 subunit connected by a peptide linker (e.g., any of SEQ ID NOs: 227-229, 245, and 246). In some embodiments, the IL-12 moiety comprises from N-terminus to C-terminus: wildtype or variant p40 subunit-linker (e.g., any of SEQ ID NOs: 227-229, 245, and 246)-wildtype or variant p35 subunit. In some embodiments, the IL-12 moiety comprises from N-terminus to C-terminus: wildtype or variant p35 subunit-linker (e.g., any of SEQ ID NOs: 227-229, 245, and 246)-wildtype or variant p40 subunit. In some embodiments, the IL-12 variant comprises one or more mutations within the p40 subunit at a position selected from the group consisting of E45, Q56, V57, K58, E59, F60, G61, D62, A63, G64, Q65, and C177 relative to a wildtype p40 subunit (SEQ ID NO: 62). In some embodiments, the IL-12 variant comprises one or more mutations within the p40 subunit selected from the group consisting of Q56A, V57A, K58A, E59A, F60A, F60D, G61A, D62A, A63S, G64A, and Q65A relative to a wildtype p40 subunit (SEQ ID NO: 62). In some embodiments, the p40 subunit of the IL-12 variant comprises the sequence of any of SEQ ID NOs: 63-66 and 140. In some embodiments, the IL-12 variant comprises an E59A/F60A mutation within the p40 subunit relative to a wildtype p40 subunit (SEQ ID NO: 62). In some embodiments, the p40 subunit of the IL-12 variant comprises the sequence of SEQ ID NO: 63. In some embodiments, the IL-12 variant comprises an F60A mutation within the p40 subunit relative to a wildtype p40 subunit (SEQ ID NO: 62). In some embodiments, the p40 subunit of the IL-12 variant comprises the sequence of SEQ ID NO: 65. In some embodiments, the IL-12 variant comprises an F60D mutation within the p40 subunit relative to a wildtype p40 subunit (SEQ ID NO: 62). In some embodiments, the p40 subunit of the IL-12 variant comprises the sequence of SEQ ID NO: 140. In some embodiments, the p40 subunit and the p35 subunit of the IL-12 or variant thereof are connected by a linker (e.g., any of SEQ ID NOs: 227-229, 245, and 246). In some embodiments, the IL-12 variant comprises the sequence of any one of SEQ ID NOs: 68-71 and 254. In some embodiments, the IL-12 moiety is a recombinant “wildtype” IL-12 comprising a wildtype p35 subunit and a wildtype p40 subunit connected by a linker (e.g., any of SEQ ID NOs: 227-229, 245, and 246), such as comprising the sequence of SEQ ID NO: 67 or 253.

[0228] In some embodiments, the IL-12 moiety is derived from mouse IL-12. The mouse p35 subunit and/or the p40 subunit can be wildtype or variant. In some embodiments, the mouse IL-12 variant comprises one or two mutations within the p40 subunit at one or both positions of E59 and F60 relative to a mouse wildtype p40 subunit. In some embodiments, the p40 subunit and the p35 subunit of the mouse IL-12 or variant thereof are connected by a linker (e.g., any of SEQ ID NOs: 227-229, 245, and 246). In some embodiments, the mouse IL-12 variant comprises the sequence of SEQ ID NO: 72.

### IL-23

[0229] In some embodiments, the immunostimulatory cytokine or variant thereof is IL-23 or variant thereof. Interleukin-23 (IL-23) belongs to the IL-12 cytokine family, is a heterodimeric cytokine consisting of an IL12B (p40) subunit (shared with IL-12) and the IL23A (p19) subunit. IL-23 functions through binding to IL-23 receptor composed of IL-12R p1 and IL-23R (p19 subunit binds IL-23R while p40 subunit binds IL-12Rβ1), resulting in Janus kinase 2 and Tyrosine kinase 2 kinases recruitment and phosphorylation of STAT3 and STAT4, leading to gene activation. STAT3 is responsible for key Th17 development characteristics such as RORγt expression, or transcription of Th17 cytokines such as IL-17, IL-21, IL-22, and GM-CSF which mediate protection against fungi and bacteria and participate in barrier immunity. IL-23 is mainly secreted by activated dendritic cells, macrophages or monocytes stimulated by antigen stimulus. IL-23 receptor is expressed on Th17 and NK cells. It was found that autoimmune and cancerous diseases are associated with IL-23 imbalance and increase. The most important function of IL-23 is its role in the development and differentiation of effector Th17 cells. In the context of chronic inflammation, activated DCs and macrophages produce IL-23, which promotes the development of Th17 cells. Autoimmune diseases such as psoriasis, Crohn's disease, rheumatoid arthritis, or multiple sclerosis have recently been found to be associated with IL-23-mediated signaling promoted by IL-23 receptor-expressing TH-17 and other lymphocyte subsets.

[0230] Native human p19 (IL-23A) precursor polypeptide consists of 189 amino acid residues (amino acids 1-19 are signal peptide), while the mature polypeptide consists of 170 amino acid residues (SEQ ID NO: 73). Native human p40 (IL-12B) precursor polypeptide consists of 328 amino acid residues (amino acids 1-22 are signal peptide), while the mature polypeptide consists of 306 amino acid residues (SEQ ID NO: 62). In some embodiments, the IL-23 moiety (or IL-23 subunit) is a mature IL-23 (or IL-23 mature subunit). In some embodiments, the IL-23A (p19) or variant thereof is a polypeptide substantially homologous to amino acid sequence of a wild-type IL-23A (p19) (SEQ ID NO: 73), e.g., having at least about 85% (such as at least about any of 90%, 91%, 92%, 93%, 94%, 95%, 96%, 97%, 98%, 99%, or 100%) amino acid sequence identity to a wild-type IL-23A (p19) (SEQ ID NO: 73). In some embodiments, the IL-12B (p40) subunit or variant thereof is a polypeptide substantially homologous to amino acid sequence of a wild-type of IL-12B (p40) (SEQ ID NO: 62), e.g., having at least about 85% (such as at least about any of 90%, 91%, 92%, 93%, 94%, 95%, 96%, 97%, 98%, 99%, or 100%) amino acid sequence identity to a wild-type of IL-12B (p40) (SEQ ID NO: 62). In some embodiments, the IL-23 (or subunit) or variant thereof is not glycosylated. In some embodiments, the IL-23 (or subunit) or variant thereof is glycosylated. In some embodiments, the IL-23 variant comprises one wildtype subunit (e.g., wt p19) and one mutant subunit (e.g., variant p40). In some embodiments, the IL-23 variant comprises two variant subunits (p19 variant and p40 variant). In some embodiments, the IL-23 variant comprises two wildtype subunits (e.g., wt p19 and p40) that are linked together via a synthetic peptide linker (e.g., any of SEQ ID NOs: 227-229, 245, and 246) or a chemical linker. Within the p40 subunit, amino acid residues that are important for IL-23 receptor binding are C177, E45, E59, and D62 (Luo et al. J Mol Biol. 2010:402(5):797-812).

[0231] In some embodiments, the IL-23 moiety comprises a wildtype p19 subunit (SEQ ID NO: 73). In some embodiments, the IL-23 moiety comprises a variant p19 subunit. In some embodiments, the IL-23 moiety comprises a wildtype p40 subunit (SEQ ID NO: 62). In some embodiments, the IL-23 moiety comprises a variant p40 subunit. In some embodiments, the IL-23 moiety comprises a wildtype or variant p19 subunit and a wildtype or variant p40 subunit connected by a peptide linker (e.g., any of SEQ ID NOs: 227-229, 245, and 246). In some embodiments, the IL-23 moiety comprises from N-terminus to C-terminus: wildtype or variant p40 subunit-linker (e.g., any of SEQ ID NOs: 227-229, 245, and 246)-wildtype or variant p19 subunit. In some embodiments, the IL-23 moiety comprises from N-terminus to C-terminus: wildtype or variant p19 subunit-linker (e.g., any of SEQ ID NOs: 227-229, 245, and 246)-wildtype or variant p40 subunit. In some embodiments, the IL-23 variant comprises one or more mutations within the p40 subunit at a position selected from the group consisting of E45, Q56, V57, K58, E59, F60, G61, D62, A63, G64, Q65, and C177 relative to a wildtype p40 subunit (SEQ ID NO: 62). In some embodiments, the IL-23 variant comprises one or more mutations within the p40 subunit selected from the group consisting of Q56A, V57A, K58A, E59A, F60A, F60D, G61A, D62A, A63S, G64A, and Q65A relative to a wildtype p40 subunit (SEQ ID NO: 62). In some embodiments, the p40 subunit of the IL-23 variant comprises the sequence of any of SEQ ID NOs: 63-66 and 140. In some embodiments, the IL-23 variant comprises an E59A/F60A mutation within the p40 subunit relative to a wildtype p40 subunit (SEQ ID NO: 62). In some embodiments, the p40 subunit of the IL-23 variant comprises the sequence of SEQ ID NO: 63. In some embodiments, the IL-23 variant comprises an F60A mutation within the p40 subunit relative to a wildtype p40 subunit. In some embodiments, the p40 subunit of the IL-23 variant comprises the sequence of SEQ ID NO: 65. In some embodiments, the IL-23 variant comprises an F60D mutation within the p40 subunit relative to a wildtype p40 subunit (SEQ ID NO: 62). In some embodiments, the p40 subunit of the IL-23 variant comprises the sequence of SEQ ID NO: 140. In some embodiments, the p40 subunit and the p19 subunit of the IL-23 or variant thereof are connected by a linker (e.g., any of SEQ ID NOs: 227-229, 245, and 246). In some embodiments, the IL-23 variant comprises the sequence of SEQ ID NO: 75. In some embodiments, the IL-23 moiety is a recombinant “wildtype” IL-23 comprising a wildtype p35 subunit and a wildtype p40 subunit connected by a linker (e.g., any of SEQ ID NOs: 227-229, 245, and 246), such as comprising the sequence of SEQ ID NO: 74.

### IL-17

[0232] In some embodiments, the immunostimulatory cytokine or variant thereof is IL-17 or variant thereof. The IL-17 family comprises IL17A, IL-17B, IL-17C, IL-17D, IL-17E (a.k.a. IL-25) and IL-17F. Interleukin 17A (IL-17A or IL-17) is a disulfide-linked, homodimeric, secreted glycoprotein with a molecular mass of about 35 kDa. Each subunit of the homodimer is approximately 15-20 KDa. IL-17A is a pro-inflammatory cytokine produced by T helper 17 (Th17) cells in response to their stimulation with IL-23. IL-17 interacts with IL-17R and activates several signaling cascades that, in turn, lead to the induction of chemokines. These chemokines act as chemoattractant to recruit immune cells, such as monocytes and neutrophils to the site of inflammation.

### Target Molecules or Target Antigens

[0233] “Target antigen” or “target epitope” used herein can refer to any protein or polypeptide that can be specifically recognized by the antigen-binding protein, antigen-binding polypeptide, or antigen-binding fragment/domain described herein (can be used interchangeably), such as tumor antigen or epitope, pathogen antigen or epitope, antigen or epitope involved in autoimmune diseases, allergy, and/or graft rejection, ligand or receptor or portion thereof (e.g., extracellular domain of a ligand/receptor), immune cell surface antigen or epitope, etc. In some embodiments, the antigen-binding protein is monovalent and monospecific. In some embodiments, the antigen-binding protein is multivalent (e.g., bivalent) and monospecific. In some embodiments, the antigen-binding protein is multivalent (e.g., bivalent) and multispecific (e.g., bispecific). The valency and specificity of the antigen-binding protein herein is referring to valency and specificity of the antigen-binding fragment(s) (e.g., ligand, receptor, VHH, scFv, or Fab) of the immunocytokine, not including valency or specificity of the cytokine or variant thereof.

[0234] In some embodiments, the target antigen is a cell surface molecule (e.g., extracellular domain of a receptor/ligand). In some embodiments, the target antigen acts as a cell surface marker on a target cell (e.g., tumor cell, immune cell) associated with a special disease state. The target antigens (e.g., tumor antigen, extracellular domain of a receptor/ligand) specifically recognized by the antigen-binding domain may be antigens on a single diseased cell or antigens that are expressed on different cells that each contribute to the disease. The target antigens specifically recognized by the antigen-binding domain(s) may be directly or indirectly involved in the diseases.

### Tumor Antigen

[0235] In some embodiments, the target antigen or epitope (such as the third target molecule) is a tumor antigen or epitope.

[0236] Tumor antigens are proteins that are produced by tumor cells that can elicit an immune response, particularly T cell mediated immune responses. The selection of the targeted antigen of the invention will depend on the particular type of cancer to be treated. Exemplary tumor antigens include, for example, a glioma-associated antigen, BCMA (B-cell maturation antigen), carcinoembryonic antigen (CEA), β-human chorionic gonadotropin, alpha-fetoprotein (AFP), lectin-reactive AFP, thyroglobulin, RAGE-1, MN-CAIX, human telomerase reverse transcriptase, RU1, RU2 (AS), intestinal carboxyl esterase, mut hsp70-2, M-CSF, prostase, prostate-specific antigen (PSA), PAP, NY-ESO-1, LAGE-la, p53, prostein, PSMA, HER2/neu, survivin and telomerase, prostate-carcinoma tumor antigen-1 (PCTA-1), MAGE, ELF2M, neutrophil elastase, ephrinB2, CD22, insulin growth factor (IGF)-I, IGF-II, IGF-I receptor, and mesothelin. In some embodiments, the tumor antigen comprises one or more antigenic cancer epitopes associated with a malignant tumor. Malignant tumors express a number of proteins that can serve as target antigens for an immune attack. These molecules include but are not limited to tissue-specific antigens such as MART-1, tyrosinase and gp100 in melanoma and prostatic acid phosphatase (PAP) and prostate-specific antigen (PSA) in prostate cancer. Other target molecules belong to the group of transformation-related molecules such as the oncogene HER2/Neu/ErbB-2. Yet another group of target antigens is onco-fetal antigens such as carcinoembryonic antigen (CEA). In B-cell lymphoma, the tumor-specific idiotype immunoglobulin constitutes a truly tumor-specific immunoglobulin antigen that is unique to the individual tumor. B-cell differentiation antigens such as CD19, CD20 and CD37 are other candidates for target antigens in B-cell lymphoma.

[0237] In some embodiments, the tumor antigen is a tumor-specific antigen (TSA) or a tumor-associated antigen (TAA). A TSA is unique to tumor cells and does not occur on other cells in the body. A TAA is not unique to a tumor cell, and instead is also expressed on a normal cell under conditions that fail to induce a state of immunologic tolerance to the antigen. The expression of the antigen on the tumor may occur under conditions that enable the immune system to respond to the antigen. TAAs may be antigens that are expressed on normal cells during fetal development, when the immune system is immature, and unable to respond or they may be antigens that are normally present at extremely low levels on normal cells, but which are expressed at much higher levels on tumor cells. Non-limiting examples of TSA or TAA antigens include the following: differentiation antigens such as MART-1/MelanA (MART-1), gp 100 (Pmel 17), tyrosinase, TRP-1, TRP-2 and tumor-specific multilineage antigens such as MAGE-1, MAGE-3, BAGE, GAGE-1, GAGE-2, p15; overexpressed embryonic antigens such as CEA; overexpressed oncogenes and mutated tumor-suppressor genes such as p53, Ras, HER2/neu; unique tumor antigens resulting from chromosomal translocations; such as BCR-ABL, E2A-PRL, H4-RET, IGH-IGK, MYL-RAR; and viral antigens, such as the Epstein Barr virus antigens EBVA and the human papillomavirus (HPV) antigens E6 and E7. Other large, protein-based antigens include TSP-180, MAGE-4, MAGE-5, MAGE-6, RAGE, NY-ESO, pl85erbB2, pl80erbB-3, c-met, nm-23H1, PSA, TAG-72, CA 19-9, CA 72-4, CAM 17.1, NuMa, K-ras, beta-Catenin, CDK4, Mum-1, p 15, p 16, 43-9F, 5T4 (TPBG), 791Tgp72, alpha-fetoprotein, beta-HCG, BCA225, BTAA, CA 125, CA 15-3\CA 27.29\BCAA, CA 195, CA 242, CA-50, CAM43, CD68\Pl, CO-029, FGF-5, G250, Ga733\EpCAM, HTgp-175, M344, MA-50, MG7-Ag, MOV18, NB/70K, NY-CO-1, RCAS 1, SDCCAGI6, TA-90\Mac-2 binding protein\cyclophilin C-associated protein, TAAL6, TAG72, TLP, and TPS.

[0238] In some embodiments, the tumor antigen is selected from the group consisting of FIXa, FX, DLL3, DLL4, Ang-2, Nectin-4, FOLRa, GPNMB, CD56 (NCAM), TACSTD2 (TROP-2), tissue factor, ENPP3, P-cadherin, STEAP1, CEACAM5, Mucin 1 (Sialoglycotope CA6), Guanylyl cyclase C (GCC), SLC44A4, LIV1 (ZiP6), NaPi2b, SLITRK6, SC-16, fibronectin, extra-domain B (EDB), Endothelium receptor ETB, ROBO4, Collagen IV, Periostin, Tenascin c, CD74, CD98, Mesothelin, TSHR, CD19, CD123, CD22, CD30, CD171, CS-1, CLL-1, CD33, EGFRvIII, GD2, GD3, BCMA, Tn Ag, prostate specific membrane antigen (PSMA), ROR1, FLT3, FAP, TAG72, CD38, CD44v6, CEA, EPCAM, B7H3, KIT, IL-13Ra2, interleukin-11 receptor a (IL-11Ra), PSCA, PRSS21, VEGFR2 (CD309), LewisY, CD24, platelet-derived growth factor receptor-beta (PDGFR-beta), SSEA-4, CD20, Folate receptor alpha, ERBB2 (HER2/neu), MUC1, epidermal growth factor receptor (EGFR), NCAM, Prostase, PAP, ELF2M, Ephrin B2, IGF-I receptor, CAIX, LMP2, gp100, bcr-abl, tyrosinase, EphA2, Fucosyl GM1, sLe, GM3, TGS5, HMWMAA, o-acetyl-GD2, Folate receptor beta, TEMI/CD248, TEM7R, CLDN6, CLDN18.2, GPRC5D, CXORF61, CD97, CD179a, ALK, Polysialic acid, PLAC1, GloboH, NY-BR-1, UPK2, HAVCR1, ADRB3, PANX3, GPR20, LY6K, OR51E2, TARP, WT1, NY-ESO-1, LAGE-1a, MAGE-A1, legumain, HPV E6,E7, MAGE Al, ETV6-AML, sperm protein 17, XAGE1, Tie 2, MAD-CT-1, MAD-CT-2, Fos-related antigen 1, p53, p53 mutant, prostein, survivin and telomerase, PCTA-1/Galectin 8, MelanA/MARTI, Ras mutant, hTERT, sarcoma translocation breakpoints, ML-IAP, ERG (TMPRSS2 ETS fusion gene), NA17, PAX3, Androgen receptor, Cyclin B1, MYCN, RhoC, TRP-2, CYP1B1, BORIS, SART3, PAX5, OY-TES1, LCK, AKAP-4, SSX2, RAGE-1, human telomerase reverse transcriptase, RU1, RU2, intestinal carboxyl esterase, mut hsp70-2, CD79a, CD79b, CD72, LAIR1, FCAR, LILRA2, CD300LF, CLEC12A, BST2, EMR2, LY75, GPC3, FCRL5, and IGLL 1. In some embodiments, the tumor antigen is selected from the group consisting of BCMA, EphA2, HER2, GD2, Glypican-3, 5T4, 8H9, αᵥβ₆ integrin, B7-H3, B7-H6, CAIX, CA9, CD19, CD20, CD22, CD30, CD33, CD38, CD44, CD44v6, CD44v7/8, CD70 (TNFSF7), CD123, CD138, CD171, CEA, CSPG4, EGFR, EGFRvIII, EGP2, EGP40, EpCAM, ERBB3, ERBB4, ErbB3/4, FAP, FAR, FBP, fetal AchR, Folate Receptor a, GD2, GD3, HLA-AI MAGE A1, HLA-A2, IL11Ra, IL13Ra2, KDR, Lewis-Y, MCSP, Mesothelin, Muc1, Muc16, NCAM, NKG2D ligands, NY-ESO-1, PRAME, PSCA, PSCl, PSMA, ROR1, SURVIVIN, TAG72, TEMI, TEMS, VEGFR2, carcinoembryonic antigen, and HMW-MAA. Also see exemplary tumor antigens described in Shim H. (Biomolecules. 2020 March; 10(3): 360), and Diamantis N. and Banerji U. Br J Cancer. 2016; 114(4): 362-367, the contents of which are incorporated herein by reference in their entirety.

[0239] In some embodiments, the tumor antigen is HER2. In some embodiments, the third binding domain specifically recognizing HER2 is derived from trastuzumab (e.g., Herceptin®), pertuzumab (e.g., Perjeta®), margetuximab, or 7C2. In some embodiments, the third binding domain specifically recognizing HER2 comprises heavy chain CDRs, light chain CDRs, or all 6 CDRs of any of trastuzumab, pertuzumab, margetuximab, or 7C2. In some embodiments, the third binding domain specifically recognizing HER2 comprises VH and/or VL of trastuzumab, pertuzumab, margetuximab, or 7C2. In some embodiments, the immunocytokine comprises a parental anti-HER2 antibody (e.g., full-length antibody).

### Pathogen Antigen

[0240] In some embodiments, the target antigen or epitope (e.g., the third target molecule) is a pathogen antigen or epitope, such as a fungal, viral, bacterial, protozoal or other parasitic antigen or epitope.

[0241] In some embodiments, the fungal antigen is from Aspergillus or Candida. Fungal antigens for use with compositions and methods of the invention include, but are not limited to, e.g., Candida fungal antigen components; Aspergillus fungal antigens; Histoplasma fungal antigens such as heat shock protein 60 (HSP60) and other Histoplasma fungal antigen components; cryptococcal fungal antigens such as capsular polysaccharides and other cryptococcal fungal antigen components; coccidiodes fungal antigens such as spherule antigens and other coccidiodes fungal antigen components; and tinea fungal antigens such as trichophytin and other coccidiodes fungal antigen components.

[0242] Bacterial antigens for use with the immunocytokine disclosed herein include, but are not limited to, e.g., bacterial antigens such as pertussis toxin, filamentous hemagglutinin, pertactin, FIM2, FIM3, adenylate cyclase and other pertussis bacterial antigen components; diphtheria bacterial antigens such as diphtheria toxin or toxoid and other diphtheria bacterial antigen components; tetanus bacterial antigens such as tetanus toxin or toxoid and other tetanus bacterial antigen components; streptococcal bacterial antigens such as M proteins and other streptococcal bacterial antigen components; gram-negative bacilli bacterial antigens such as lipopolysaccharides and other gram-negative bacterial antigen components, Mycobacterium tuberculosis bacterial antigens such as mycolic acid, heat shock protein 65 (HSP65), the 30 kDa major secreted protein, antigen 85A and other mycobacterial antigen components; Helicobacter pylori bacterial antigen components; pneumococcal bacterial antigens such as pneumolysin, pneumococcal capsular polysaccharides and other pneumococcal bacterial antigen components; Haemophilus influenza bacterial antigens such as capsular polysaccharides and other Haemophilus influenza bacterial antigen components; anthrax bacterial antigens such as anthrax protective antigen and other anthrax bacterial antigen components; rickettsiae bacterial antigens such as rompA and other rickettsiae bacterial antigen component. Also included with the bacterial antigens described herein are any other bacterial, mycobacterial, mycoplasmal, rickettsial, or chlamydial antigens. Partial or whole pathogens may also be: Haemophilus influenza; Plasmodium falciparum; Neisseria meningitidis; Streptococcus pneumoniae; Neisseria gonorrhoeae; Salmonella serotype typhi; Shigella; Vibrio cholerae; Dengue Fever; Encephalitides; Japanese Encephalitis; lyme disease; Yersinia pestis; west nile virus; yellow fever; tularemia; hepatitis (viral; bacterial); RSV (respiratory syncytial virus); HPIV 1 and HPIV 3; adenovirus; smallpox; allergies and cancers.

[0243] Examples of protozoal and other parasitic antigens include, but are not limited to, e.g., Plasmodium falciparum antigens such as merozoite surface antigens, sporozoite surface antigens, circumsporozoite antigens, gametocyte/gamete surface antigens, blood-stage antigen pf 155/RESA and other plasmodial antigen components; Toxoplasma antigens such as SAG-1, p30 and other toxoplasmal antigen components; schistosomae antigens such as glutathione-S-transferase, paramyosin, and other schistosomal antigen components; Leishmania major and other leishmaniae antigens such as gp63, lipophosphoglycan and its associated protein and other leishmanial antigen components; and Trypanosoma cruzi antigens such as the 75-77 kDa antigen, the 56 kDa antigen and other trypanosomal antigen components.

[0244] In some embodiments, the viral antigen is from Herpes simplex virus (HSV), respiratory syncytial virus (RSV), metapneumovirus (hMPV), rhinovirus, parainfluenza (PIV), Epstein-Barr virus (EBV), Cytomegalovirus (CMV), JC virus (John Cunningham virus), BK virus, HIV, Zika virus, human coronavirus, norovirus, encephalitis virus, or Ebola. In some embodiments, the virus is an Orthomyxoviridae virus selected from the group consisting of Influenza A virus, Influenza B virus, Influenza C virus, and any subtype or reassortant thereof. In some embodiments, the virus is an Influenza A virus or any subtype or reassortant thereof, such as Influenza A virus subtype H1N1 (H1N1) or Influenza A virus subtype H5N1 (H5N1). In some embodiments, the virus is a Coronaviridae virus selected from the group consisting of alpha coronaviruses 229E (HCoV-229E), New Haven coronavirus NL63 (HCoV-NL63), beta coronaviruses OC43 (HCoV-OC43), coronavirus HKU1 (HCoV-HKU1), Severe Acute Respiratory Syndrome coronavirus (SARS-CoV), Middle East Respiratory Syndrome coronavirus (MERS-CoV), and Severe Acute Respiratory Syndrome Coronavirus 2 (SARS-CoV-2). In some embodiments, the virus is SARS-CoV, MERS-CoV, or SARS-CoV-2. In some embodiments, the virus is a Filoviridae virus selected from Ebola virus (EBOV) and Marburg virus (MARV). In some embodiments, the virus is a Flaviviridae virus selected from the group consisting of Zika virus (ZIKV), West Nile virus (WNV), Dengue virus (DENV), and Yellow Fever virus (YFV).

### Antigens Involved in Autoimmune Diseases, Allergy, and Graft Rejection

[0245] In some embodiments, the target antigen or epitope (e.g., the third target molecule) is an antigen or epitope involved in autoimmune diseases, allergy, and/or graft rejection. For example, an antigen involved in any one or more of the following autoimmune diseases or disorders can be used in the present invention: diabetes, diabetes mellitus, arthritis (including rheumatoid arthritis, juvenile rheumatoid arthritis, osteoarthritis, psoriatic arthritis), multiple sclerosis, myasthenia gravis, systemic lupus erythematosis, autoimmune thyroiditis, dermatitis (including atopic dermatitis and eczematous dermatitis), psoriasis, Sjogren's Syndrome, including keratoconjunctivitis sicca secondary to Sjogren's Syndrome, alopecia greata, allergic responses due to arthropod bite reactions, Crohn's disease, aphthous ulcer, iritis, conjunctivitis, keratoconjunctivitis, ulcerative colitis, asthma, allergic asthma, cutaneous lupus erythematosus, scleroderma, vaginitis, proctitis, drug eruptions, leprosy reversal reactions, erythema nodosum leprosum, autoimmune uveitis, allergic encephalomyelitis, acute necrotizing hemorrhagic encephalopathy, idiopathic bilateral progressive sensorineural hearing loss, aplastic anemia, pure red cell anemia, idiopathic thrombocytopenia, polychondritis, Wegener's granulomatosis, chronic active hepatitis, Stevens-Johnson syndrome, idiopathic sprue, lichen planus, Crohn's disease, inflammatory bowel disease (IBD), Graves ophthalmopathy, sarcoidosis, primary biliary cirrhosis, uveitis posterior, and interstitial lung fibrosis. Examples of antigens involved in autoimmune disease include glutamic acid decarboxylase 65 (GAD 65), native DNA, myelin basic protein, myelin proteolipid protein, acetylcholine receptor components, thyroglobulin, and the thyroid stimulating hormone (TSH) receptor. Examples of antigens involved in allergy include pollen antigens such as Japanese cedar pollen antigens, ragweed pollen antigens, rye grass pollen antigens, animal derived antigens such as dust mite antigens and feline antigens, histocompatibility antigens, and penicillin and other therapeutic drugs. Examples of antigens involved in graft rejection include antigenic components of the graft to be transplanted into the graft recipient such as heart, lung, liver, pancreas, kidney, and neural graft components. The antigen may be an altered peptide ligand useful in treating an autoimmune disease. In some embodiments, the target antigen is CD3, CD4, CD123, or CD8.

### Immune Checkpoint Molecule

[0246] In some embodiments, the target antigen or epitope (e.g., the first, second, and/or third target molecule) is an immune checkpoint molecule. Immune checkpoints are regulators of the immune system.

[0247] In some embodiments, the immune checkpoint molecule is a stimulatory immune checkpoint molecule. In some embodiments, the stimulatory immune checkpoint molecule is selected from the group consisting of CD27, CD28, OX40, ICOS, GITR, 4-1BB, CD27, CD40, CD3, and HVEM. Thus, in some embodiments, the first binding domain described herein is an activator of a stimulatory immune checkpoint molecule, which can stimulate, activate, or increase the intensity of an immune response mediated by a stimulatory immune checkpoint molecule. The antibody or antigen-binding fragment described herein can be derived from any antibody known in the art that activates a stimulatory immune checkpoint molecule. In some embodiments, the first binding domain is a ligand or receptor of a stimulatory immune checkpoint molecule, e.g., can activate stimulatory immune checkpoint signaling. In some embodiments, the second binding domain (e.g., antibody, antigen-binding domain, or ligand/receptor-Fc fusion protein) described herein is an antagonist of a stimulatory immune checkpoint molecule, which can reduce or block the intensity of an immune response mediated by a stimulatory immune checkpoint molecule.

[0248] In some embodiments, the immune checkpoint molecule is an inhibitory immune checkpoint molecule. In some embodiments, the inhibitory immune checkpoint molecule is selected from the group consisting of PD-1, PD-L1, PD-L2, CTLA-4, LAG-3, TIM-3, HHLA2, CD47, CXCR4, CD160, CD73, BLTA, B7-H4, TIGIT, and VISTA. In some embodiments, the inhibitory immune checkpoint molecule is PD-1, PD-L2, or PD-L1. In some embodiments, the inhibitory immune checkpoint molecule is CTLA-4. In some embodiments, the inhibitory immune checkpoint molecule is TIGIT. Thus, in some embodiments, the antigen-binding protein (e.g., antibody, antigen-binding domain, or ligand/receptor-Fc fusion protein) described herein is an immune checkpoint inhibitor, which totally or partially reduces, inhibits, or interferes with one or more inhibitory immune checkpoint molecules. The antibody or antigen-binding domain described herein can be derived from any antibody known in the art that serves as an immune checkpoint inhibitor. In some embodiments, the antigen-binding fragment is a ligand (e.g., CD155, PD-L2 or PD-L1) or receptor of an inhibitory immune checkpoint molecule (e.g., TIGIT or PD-1), e.g., can activate or stimulate an inhibitory immune checkpoint signaling (e.g., TIGIT or PD-1 signaling). In some embodiments, the antigen-binding protein (e.g., antibody, antigen-binding domain, or ligand/receptor-Fc fusion protein) described herein is an agonist of an inhibitory immune checkpoint molecule, which can stimulate, activate, or increase the intensity of an immune response mediated by an inhibitory immune checkpoint molecule.

### Cell Surface Ligand or Receptor

[0249] In some embodiments, the target antigen or epitope (e.g., the third target molecule) is a ligand or receptor or portion thereof, such as extracellular domain of a ligand/receptor. In some embodiments, the ligand or receptor is derived from a molecule selected from the group consisting of IL-2, IL-2Rα (CD25), IL-3Rα (CD123), PD-1, PD-L1, PD-L2, CD155, NKG2A, NKG2C, NKG2F, NKG2D, BCMA, APRIL, BAFF, IL-3, IL-13, LLT1, AICL, DNAM-1, and NKp80. In some embodiments, the ligand is derived from APRIL and/or BAFF, which can bind to BCMA. In some embodiments, the receptor is an FcR and the ligand is an Fc-containing molecule. In some embodiments, the FcR is an Fcγ receptor (FcγR). In some embodiments, the FcγR is selected from the group consisting of FcγRIA (CD64A), FcγRIB (CD64B), FcγRIC (CD64C), FcγRIIA (CD32A), FcγRIIB (CD32B), FcγRIIIA (CD16a), and FcγRIIIB (CD16b).

[0250] The receptor of IL-2, interleukin-2 receptor (IL-2R), is a heterotrimeric protein expressed on the surface of certain immune cells, such as lymphocytes. TL-2R has three forms generated by different combinations of α chain (IL-2Rα, CD25, Tac antigen), β chain (IL-2Rβ, CD122), and γ chain (IL-2Rγ, γ_{c}, common gamma chain, or CD132). IL-2Rα binds IL-2 with low affinity, and the complex of IL-2Rβ and IL-2Rγ binds IL-2 with intermediate affinity, primarily on memory T cells and NK cells. The complex of all α, β, and γ chains bind IL-2 with high affinity on activated T cells and regulatory T cells (Tregs). CD25 (IL-2Rα) plays a critical role in the development and maintenance of Tregs, and may play a role in Treg expression of CD62L, which is required for the entry of Tregs into lymph nodes (Malek and Bayer, 2004). CD25 is a marker for activated T cells and Treg.

### Immune Cell Surface Antigen

[0251] In some embodiments, the target antigen or epitope (e.g., the third target molecule) is an immune cell surface antigen or epitope. Immune cells have different cell surface molecules. For example CD3 is a cell surface molecule on T-cells, whereas CD16, NKG2D, or NKp30 are cell surface molecules on NK cells, and CD3 or an invariant T-cell receptor (TCR) are the cell surface molecules on NKT-cells. In some embodiments, wherein the immune cell is a T-cell, the activation molecule is one or more of CD3, e.g., CD3ε, CD3δ, or CD3γ; or CD2, CD4, CD8, CD27, CD28, CD40, CD134, CD137, CD278, inhibitory immune checkpoint molecules (e.g., CTLA-4, PD-1, TIM3, BTLA, VISTA, LARG-3, or TIGIT), and stimulatory immune checkpoint molecules (CD27, CD28, CD137, OX40, GITR, or HVEM). In some embodiments, wherein the immune cell is a B cell, the cell surface molecule is CD19, CD20, or CD138. In other some embodiments, wherein the immune cell is a NK cell, the cell surface molecule is CD16, CD56 (NCAM), NKp46, NKp44, CD244, CD226, TIGIT, CD96, LAG3, TIM3, PD-1, KLRG1, CD161, CD94/NKG2, KIR, NKG2D, or NKp30. In some embodiments, wherein the immune cell is a NKT-cell, the cell surface molecule is CD3 or an invariant TCR. In some embodiments, wherein the immune cell is a myeloid dendritic cell (mDC), the cell surface molecule is CD11c, CD11b, CD13, CD45RO, or CD33. In some embodiments, wherein the immune cell is a plasma dendritic cell (pDC), the cell surface molecule is CD123, CD62L, CD45RA, or CD36. In some embodiments, wherein the immune cell is a macrophage, the cell surface molecule is CD163 or CD206. In some embodiments, the immune cell is selected from the group consisting of a monocyte, a dendritic cell, a macrophage, a B cell, a killer T cell (T_{c}, cytotoxic T lymphocyte, or CTL), a helper T cell (Tₕ), a regulatory T cells (Treg), a γδ T cell, a natural killer T (NKT) cell, and a natural killer (NK) cell.

[0252] In some embodiments, the immune cell surface antigen is selected from the group consisting of CD3 (e.g., CD3ε, CD3δ, CD3γ), CD4, CD5, CD8, CD16, CD27, CD28, CD40, CD64, CD89, CD134, CD137, CD278, NKp46, NKp30, NKG2D, TCRα, TCRβ, TCRγ, and TCRδ. In some embodiments, the immune cell surface antigen is CD3, CD4, or CD8.

[0253] Exemplary anti-CD4 antibodies include, but are not limited to, Ibalizumab (e.g., Trogarzo®), MAX.16H5, and IT1208. Exemplary anti-CD3 antibodies include, but are not limited to OKT3. Exemplary anti-CD8 antibodies include, but are not limited to, G10-1, OKT8, YTC182.20, 4B 11, and DK25.

### Activities of Binding Domains or Cytokines or Variants Thereof

[0254] The “activity” of a binding domain (e.g., to its target molecule) described herein comprises the binding affinity of the binding domain to corresponding target molecule; and/or the biological activity (or bioactivity) of the binding domain (e.g., cytokine or a variant thereof), such as inducing or inhibiting signal transduction, inducing or inhibiting cell proliferation, differentiation, and/or activation, inducing or inhibiting the secretion of effecting cytokine(s) (e.g., pro-inflammatory cytokines), inducing or inhibiting cytotoxicity against a tumor cell, inducing or inhibiting infectious agent elimination etc., upon binding domain/its target molecule binding. These biological activities are also referred to herein as direct biological activities. In some embodiments, the biological activity of a binding domain (e.g., to its target molecule) also comprises indirect biological activities, such as any biological activity resulting from the direct biological activities.

[0255] The “activity” of a cytokine or a variant thereof described herein comprises the binding affinity of the cytokine or a variant thereof to corresponding cytokine receptor; and/or the biological activity (or bioactivity) of the cytokine or a variant thereof, such as inducing or inhibiting signal transduction, inducing or inhibiting cell proliferation, differentiation, and/or activation, inducing or inhibiting the secretion of effecting cytokine(s) (e.g., pro-inflammatory cytokines), etc., upon cytokine/cytokine receptor binding. These biological activities are also referred to herein as direct biological activities. In some embodiments, the biological activity of a cytokine or a variant thereof also comprises indirect biological activities, such as any biological activity resulting from the direct biological activities. For example, in some embodiments, the biological activity also comprises cancer cell killing by immune cells attracted to the tumor site due to the secreted effecting cytokines, such as inflammatory markers IL-6, MIP-2 (GRO-β)/CXCL2, G-CSF/CSF3, TIMP-1, KC (GRO-α)/CXCL1, etc.

[0256] In some embodiments, the first binding domain or portion thereof is positioned at a hinge region (at N′ of hinge, C′ of hinge, or within hinge) between the second binding domain or portion thereof and an Fc domain subunit or portion thereof of the immunomodulatory molecule. In some embodiments, in the presence of binding of the second binding domain (e.g., ligand, receptor, VHH, scFv, or Fab) of the immunomodulatory molecule described herein to the second target antigen, the activity (binding affinity to first target molecule such as cytokine receptor, and/or biological activity) of the first binding domain (e.g., immunostimulatory cytokine or variant thereof) increases at least about 20% (such as at least about any of 30%, 40%, 50%, 60%, 70%, 80%, 90%, 100%, 200%, 300%, 400%, 500%, or more) compared to that in the absence of binding of the second binding domain to the second target molecule. In some embodiments, in the presence of binding of the second binding domain (e.g., ligand, receptor, VHH, scFv, or Fab) of the immunomodulatory molecule described herein to the second target molecule, the activity (binding affinity to the first target molecule such as cytokine receptor, and/or biological activity) of the first binding domain (e.g., immunostimulatory cytokine or variant thereof) increases to at least about 2-fold (such as at least about any of 3, 4, 5, 6, 7, 8, 9, 10, 20, 30, 40, 50, 60, 70, 80, 90, or 100-fold) of that in the absence of binding of the second binding domain to the second target molecule.

[0257] In some embodiments, in the absence of binding of the second binding domain (e.g., ligand, receptor, VHH, scFv, or Fab) of the immunomodulatory molecule described herein to the second target antigen, the activity (binding affinity to the first target molecule such as cytokine receptor, and/or biological activity) of the first binding domain (e.g., immunostimulatory cytokine or variant thereof) positioned at the hinge region of the antigen-binding polypeptide (such as positioned at the hinge region of a heavy chain of an antibody (e.g., full-length antibody), or positioned at the hinge region between the second binding domain (e.g., ligand, receptor, VHH, scFv, or Fab) and an Fc domain subunit (or portion thereof), see FIGS. 1A-1D, 1G, 1H, 1L-1O) is no more than about 70% (such as no more than about any of 60%, 50%, 40%, 30%, 20%, 10%, 9%, 8%, 7%, 6%, 5%, 4%, 3%, 2%, 1%, 0.9%, 0.8%, 0.7%, 0.6%, 0.5%, 0.4%, 0.3%, 0.2%, 0.1%, or 0%) of that of a corresponding first binding domain (e.g., immunostimulatory cytokine or variant thereof) in a free state.

[0258] In some embodiments, the “corresponding first binding domain” (e.g., “corresponding cytokine or variant thereof”) is the same as the first binding domain (e.g., cytokine or variant thereof) positioned at the hinge region, but expressed under a different state or at a different position. A first binding domain (e.g., cytokine or variant thereof) “in a free state” herein refers to a first binding domain (e.g., cytokine or variant thereof) in a soluble form, without attaching to any moiety such as cell membrane or another molecule (e.g., Fc fragment, or N-terminus or C-terminus of a full-length antibody or antigen binding fragment (e.g., ligand, receptor, VHH, scFv, or Fab)).

[0259] In some embodiments, in the absence of binding of the second binding domain of a full-length antibody to the second target antigen, the activity (binding affinity to first target molecule such as cytokine receptor or subunit thereof, and/or biological activity) of the first binding domain (e.g., cytokine or variant thereof) positioned at the hinge region of a heavy chain of the full-length antibody is no more than about 50% (such as no more than about any of 40%, 30%, 20%, 10%, 9/, 8%, 7%, 6%, 5%, 4%, 3%, 2%, 1%, 0.9%,0.8%, 0.7%, 0.6%, 0.5%, 0.4%, 0.3%, 0.2%, 0.1%, or 0%) of that of a corresponding first binding domain (e.g., cytokine or variant thereof) expressed at any of: i) the N-terminus of a VH of the full-length antibody, ii) the N-terminus of a VL of the full-length antibody, iii) the C-terminus of a heavy chain of the full-length antibody, iv) the C-terminus of a CL of the full-length antibody, and v) the N-terminus of an Fc domain subunit of the full-length antibody. In some embodiments, in the absence of binding of the second binding domain (e.g., scFv or Fab) to the second target molecule, the activity (binding affinity to first target molecule such as cytokine receptor, and/or biological activity) of the first binding domain (e.g., cytokine or variant thereof) positioned at the hinge region between the second binding domain (e.g., scFv or Fab) and an Fc domain subunit (or portion thereof) is no more than about 50% (such as no more than about any of 40%, 30%, 20%, 10%, 9%, 8%, 7%, 6%, 5%, 4%, 3%, 2%, 1%, 0.9%, 0.8%, 0.7%, 0.6%, 0.5%, 0.4%, 0.3%, 0.2%, 0.1%, or 0%) of that of a corresponding first binding domain (e.g., cytokine or variant thereof) expressed at any of: i) the N-terminus of a VH of the second binding domain (e.g., scFv or Fab), ii) the N-terminus of a VL of the second binding domain (e.g., scFv or Fab), iii) the C-terminus of the Fc domain subunit (or portion thereof), iv) the C-terminus of a CL of the second binding domain (Fab), and v) the N-terminus of the Fc domain subunit. In some embodiments, in the absence of binding of the second binding domain (e.g., VHH, ligand, or receptor) to the second target antigen, the activity (binding affinity to the first target molecule such as cytokine receptor or subunit thereof, and/or biological activity) of the first binding domain (e.g., cytokine or variant thereof) positioned at the hinge region between the second binding domain (e.g., VHH, ligand, or receptor) and an Fc domain subunit (or portion thereof) is no more than about 50% (such as no more than about any of 40%, 30%, 20%, 10%, 9%, 8%, 7%, 6%, 5%, 4%, 3%, 2%, 1%, 0.9%, 0.8%, 0.7%, 0.6%, 0.5%, 0.4%, 0.3%, 0.2%, 0.1%, or 0%) of that of a corresponding first binding domain (e.g., cytokine or variant thereof) expressed at any of: i) the N-terminus of the second binding domain (e.g., VHH, ligand, or receptor), ii) the C-terminus of the Fc domain subunit (or portion thereof), and iii) the N-terminus of the Fc domain subunit.

[0260] In some embodiments, in the presence of binding of the second binding domain of a full-length antibody to the second target molecule, the activity (binding affinity to first target molecule such as cytokine receptor or subunit thereof, and/or biological activity) of the first binding domain (e.g., cytokine or variant thereof) positioned at the hinge region of a heavy chain of the full-length antibody is at least about 70% (such as at least about any of 80%, 90%, 100%, 110%, 120%, 130%, 140%, 150%, 160%, 170%, 180%, 190%, 200%, 300%, 400%, 500%, or more) of that of a corresponding first binding domain (e.g., cytokine or variant thereof) expressed at any of: i) the N-terminus of a VH of the full-length antibody, ii) the N-terminus of a VL of the full-length antibody, iii) the C-terminus of a heavy chain of the full-length antibody, iv) the C-terminus of a CL of the full-length antibody, and v) the N-terminus of an Fc subunit of the full-length antibody. In some embodiments, in the presence of binding of the second binding domain (e.g., scFv or Fab) to the second target molecule, the activity (binding affinity to first target molecule such as cytokine receptor or subunit thereof, and/or biological activity) of the first binding domain (e.g., cytokine or variant thereof) positioned at the hinge region between the second binding domain (e.g., scFv or Fab) and an Fc domain subunit (or portion thereof) is at least about 70% (such as at least about any of 80%, 90%, 100%, 110%, 120%, 130%, 140%, 150%, 160%, 170%, 180%, 190%, 200%, 300%, 400%, 500%, or more) of that of a corresponding first binding domain (e.g., cytokine or variant thereof) expressed at any of: i) the N-terminus of a VH of the second binding domain (e.g., scFv or Fab), ii) the N-terminus of a VL of the second binding domain (e.g., scFv or Fab), iii) the C-terminus of the Fc domain subunit (or portion thereof), iv) the C-terminus of a CL of the second binding domain (Fab), and v) the N-terminus of the Fc domain subunit. In some embodiments, in the presence of binding of the second binding domain (e.g., VHH, ligand, or receptor) to the second target molecule, the activity (binding affinity to first target molecule such as cytokine receptor or subunit thereof, and/or biological activity) of the first binding domain (e.g., cytokine or variant thereof) positioned at the hinge region between the second binding domain (e.g., VHH, ligand, or receptor) and an Fc domain subunit (or portion thereof) is at least about 70% (such as at least about any of 80%, 90%, 100%, 110%, 120%, 130%, 140%, 150%, 160%, 170%, 180%, 190%, 200%, 300%, 400%, 500%, or more) of that of a corresponding first binding domain (e.g., cytokine or variant thereof) expressed at any of; i) the N-terminus of the second binding domain (e.g., VHH, ligand, or receptor), ii) the C-terminus of the Fc domain subunit (or portion thereof), and iii) the N-terminus of the Fc domain subunit.

[0261] In some embodiments, the first binding domain is a ligand or variand thereof. In some embodiments, the first binding domain is a cytokine (e.g., immunostimulatory cytokine) or variand thereof. In some embodiments, the immunostimulatory cytokine is selected from the group consisting of IL-1, IL-2, IL-3, IL-4, IL-5, IL-6, IL-7, IL-8, IL-9, IL-12, IL-15, IL-17, IL-18, IL-21, IL-22, IL-23, IL-27, IFN-α, IFN-β, IFN-γ, TNF-α, erythropoietin, thrombopoietin, G-CSF, M-CSF, SCF, and GM-CSF. In some embodiments, the activity (binding affinity to corresponding cytokine receptor or subunit thereof, and/or biological activity) of the cytokine variant in a free state is no more than about 80% (such as no more than about any of 70%, 60%, 50%, 40%, 30%, 20%, 10%, or 5%) of that of a corresponding wildtype cytokine in a free state. In some embodiments, the activity (binding affinity to corresponding cytokine receptor or subunit thereof, and/or biological activity) of the cytokine variant in a free state is the same or similar (such as within about 20% difference) of that of a corresponding wildtype cytokine in a free state. In some embodiments, the cytokine or variant thereof is a cytokine variant. In some embodiments, the first binding domain is an immunostimulatory cytokine variant, and wherein the activity (binding affinity to first target molecule such as corresponding cytokine receptor or subunit thereof, and/or biological activity) of the immunostimulatory cytokine variant in a free state is no more than about 80% (such as no more than about any of 70%, 60%, 50%, 40%, 30%, 20%, 10%, or 5%) of that of a corresponding wildtype immunostimulatory cytokine in a free state.

[0262] In some embodiments, in the absence of binding of the second binding domain (e.g., ligand, receptor, VHH, scFv, or Fab) of the immunomodulatory molecule described herein to the second target molecule, the activity (binding affinity to first target molecule such as corresponding cytokine receptor or subunit thereof, and/or biological activity) of the first binding domain (e.g., cytokine variant) positioned at the hinge region of the antigen-binding polypeptide (such as positioned at the hinge region of a heavy chain of the antibody (e.g., full-length antibody), or positioned at the hinge region between an second binding domain (e.g., ligand, receptor, VHH, scFv, or Fab) and an Fc domain subunit (or portion thereof)) is no more than about 80% (such as no more than about any of 70%, 60%, 50%, 40%, 30%, 20%, 10%, 9%, 8%, 7%, 6%, 5%, 4%, 3%, 2%, 1%, 0.9%,0.8%, 0.7%, 0.6%, 0.5%, 0.4%, 0.3%, 0.2%, 0.1%, or 0%) of that of a corresponding wildtype or non-variant first binding domain (e.g., wildtype cytokine, or a corresponding recombinant “wildtype” cytokine expressed in the same format but comprising wildtype subunits) positioned at the same region. For example, in some embodiments, the IL-12 variant comprises from N-terminus to C-terminus: variant p40 subunit-linker-wildtype p35 subunit, and the corresponding recombinant “wildtype” IL-12 comprises from N-terminus to C-terminus: wildtype p40 subunit-linker-wildtype p35 subunit. In some embodiments, the cytokine variant is an IL-2 variant, and the corresponding wildtype cytokine is a “wildtype” IL-2.

[0263] In some embodiments, in the presence of binding of the second binding domain (e.g., ligand, receptor, VHH, scFv, or Fab) of the immunomodulatory molecule described herein to the second target molecule, the activity (binding affinity to first target molecule such as corresponding cytokine receptor or subunit thereof, and/or biological activity) of the first binding domain (e.g., cytokine variant) positioned at the hinge region of the antigen-binding polypeptide (such as positioned at the hinge region a heavy chain of an antibody (e.g., full-length antibody), or positioned at the hinge region between an second binding domain (e.g., ligand, receptor, VHH, scFv, or Fab) and an Fc domain subunit (or portion thereof)) is at least about 1% (such as at least about any of 2%, 3%, 4%, 5%, 6%, 7%, 8%, 9%, 10%, 20%, 30%, 40%, 50%, 60%, 70%, 80%, 90%, 100%, 110%, 120%, 130%, 140%, 150%, 160%, 170%, 180%, 190%, 200%, or more) of that of a corresponding wildtype or non-variant first binding domain (e.g., wildtype cytokine, or a corresponding recombinant “wildtype” cytokine expressed in the same format but comprising wildtype subunits) positioned at the same region.

[0264] In some embodiments, in the absence of binding of the second binding domain (e.g., ligand, receptor, VHH, scFv, or Fab) of the immunomodulatory molecule described herein to the second target molecule, the activity (binding affinity to first target molecule such as corresponding cytokine receptor or subunit thereof, and/or biological activity) of the first binding domain (e.g., cytokine variant) positioned at the hinge region of the antigen-binding polypeptide (such as positioned at the hinge region of a heavy chain of an antibody (e.g., full-length antibody), or positioned at the hinge region between an second binding domain (e.g., ligand, receptor, VHH, scFv, or Fab) and an Fc domain subunit (or portion thereof)) is no more than about 80% (such as no more than about any of 70%, 60%, 50%, 40%, 30%, 20%, 10%, 9%, 8%, 7%, 6%, 5%, 4%, 3%, 2%, 1%, 0.9%,0.8%, 0.7%, 0.6%, 0.5%, 0.4%, 0.3%, 0.2%, 0.1%, or 0%) of that of a corresponding wildtype or non-variant first binding domain (e.g., wildtype cytokine, or a corresponding recombinant “wildtype” cytokine in the same format but comprising wildtype subunits) positioned at the same region; and in the presence of binding of the second binding domain (e.g., ligand, receptor, VHH, scFv, or Fab) of the immunomodulatory molecule described herein to the second target molecule, the activity (binding affinity to first target molecule such as corresponding cytokine receptor or subunit thereof, and/or biological activity) of the first binding domain (e.g., cytokine variant) positioned at the hinge region of the antigen-binding polypeptide (such as positioned at the hinge region of a heavy chain of an antibody (e.g., full-length antibody), or positioned at the hinge region between an second binding domain (e.g., ligand, receptor, VHH, scFv, or Fab) and an Fc domain subunit (or portion thereof)) is at least about 1% (such as at least about any of 2%, 3%, 4%, 5%, 6%, 7%, 8%, 9%, 10%, 20%, 30%, 40%, 50%, 60%, 70%, 80%, 90%, 100%, 110%, 120%, 130%, 140%, 150%, 160%, 170%, 180%, 190%, 200%, or more) of that of a corresponding wildtype or non-variant first binding domain (e.g., wildtype cytokine, or a corresponding recombinant “wildtype” cytokine in the same format but comprising wildtype subunits) positioned at the same region.

### Binding Affinity

[0265] Binding affinity of a molecule (e.g., cytokine moiety, immunomodulatory molecule comprising a cytokine moiety, or binding domain) and its binding partner (e.g., cytokine receptor or subunits thereof, or target molecule) can be determined experimentally by any suitable ligand binding assays or antibody/antigen binding assays known in the art, e.g., Western blots, sandwich enzyme-linked immunosorbent assay (ELISA), Meso Scale Discovery (MSD) electrochemiluminescence, bead based multiplex immunoassays (MIA), RIA, Surface Plasma Resonance (SPR), ECL, IRMA, FACS, EIA, Biacore assay, Octet analysis, peptide scans, etc. For example, easy analysis is possible by using the cytokine or variant thereof, immunomodulatory molecule comprising the cytokine or variant thereof, or its corresponding receptor or subunits thereof marked with a variety of marker agents, as well as by using BiacoreX (made by Amersham Biosciences), which is an over-the-counter, measuring kit, or similar kit, according to the user's manual and experiment operation method attached with the kit.

[0266] In some embodiments, protein microarray is used for analyzing the interaction, function and activity of the binding domain (e.g., cytokine moiety) described herein to its corresponding target molecule (e.g., cytokine receptor), on a large scale. The protein chip has a support surface bound with a range of capture proteins (e.g., cytokine receptor or subunits thereof). Fluorescently labeled probe molecules (e.g., cytokine moiety or immunomodulatory molecule described herein) are then added to the array and upon interaction with the bound capture protein, a fluorescent signal is released and read by a laser scanner.

[0267] In some embodiments, the binding affinity of a binding domain (e.g., cytokine moiety) or immunomodulatory molecule described herein and its corresponding target molecule (e.g., cytokine receptor or subunit thereof) is measured using SPR (Biacore T-200). For example, anti-human antibody is coupled to the surface of a CM-5 sensor chip (e.g., using EDC/NHS chemistry). Then a human cytokine receptor-Fc fusion protein (e.g., IL-2Rα-Fc, IL-2Rβ-Fc, IL-2Rγ-Fc) is used as the captured ligand over this surface. Serial dilutions of immunomodulatory molecule comprising a cytokine moiety (e.g., IL-2 variant) are allowed to bind to the captured ligands (free state IL-2 variant serves as control), and the response units (RU) can be plotted against immunomodulatory molecule concentration to determine EC50 values, or plotted against time to monitor the binding and dissociation of immunomodulatory molecule to cytokine receptor-Fc in real time. Equilibrium dissociation constant (K_{D}) and dissociation rate constant can be determined by performing kinetic analysis using Biacore evaluation software. The binding affinity of each test immunomodulatory molecule to the cytokine receptor can be calculated as percentage relative to that of a corresponding free state cytokine moiety. In some embodiments, a cell line expressing a cytokine receptor (e.g., IL-2R) on the cell surface is incubated with an immunomodulatory molecule comprising a cytokine moiety (e.g., IL-2 variant) described herein, after incubation, the cells are washed, then an anti-IgG-conjugated with fluorescent protein (e.g., APC) is added to detect binding affinity of the immunomodulatory molecule to the cells, such as by FACS.

[0268] In some embodiments, the K_{D} of the binding between the binding domain (e.g., cytokine or variant thereof) in free state and its corresponding target molecule (e.g., cytokine receptor or subunits thereof) is about any of ≤10⁻⁵ M, ≤10⁻⁶ M, ≤10⁻⁷ M, ≤10⁻⁸ M, ≤10⁻⁹ M, ≤10⁻¹⁰ M, ≤10⁻¹¹ M, or ≤10⁻¹² M. In some embodiments, in the absence of binding of the second binding domain (e.g., ligand, receptor, VHH, scFv, or Fab) of the immunomodulatory molecule described herein to the second target molecule, the K_{D} of the binding between the first binding domain (e.g., cytokine or variant thereof) positioned at the hinge region of the antigen-binding polypeptide (such as positioned at the hinge region of a heavy chain of the antibody (e.g., full-length antibody), or positioned at the hinge region between an second binding domain (e.g., ligand, receptor, VHH, scFv, or Fab) and an Fc domain subunit (or portion thereof)) and its corresponding first target molecule (e.g., cytokine receptor or subunits thereof) is undetectable (e.g., no binding), or the KD is higher than (i.e., binds weaker than) that in the presence of binding of the second binding domain (e.g., ligand, receptor, VHH, scFv, or Fab) of the immunomodulatory molecule described herein to the second target molecule.

### Biological Activity

[0269] Various methods for determining the biological activities (or bioactivities) of binding domains (e.g., cytokines or variants thereof), or immunomodulatory molecules described herein are described in the art, such as bioassays. Any antigen/antibody binding, ligand/receptor binding, or cytokine assays known in the art can be adapted to test bioactivities of binding domains (e.g., cytokine moieties) or immunomodulatory molecules described herein.

[0270] For example, a bioassay focuses on biological activity of cytokines or ligands/receptors and using it as a read out. In a bioassay, the activity of a sample is tested on a sensitive cell line (e.g., primary cell cultures or in vitro adapted cell lines that are dependent and/or responsive to the test sample) and the results of this activity (e.g., cellular proliferation) are compared to a standard cytokine preparation. Other aspects of biological activity of cytokines include induction of further cytokine secretion, induction of killing, antiviral activity, degranulation, cytotoxicity, chemotaxis, and promotion of colony formation. In vitro assays to measure all of these activities are available. See, e.g., “Cytokine Bioassays” of Bioassays—BestProtocols®, from eBioscience® (http://tools.thermofisher.com/content/sfs/manuals/cytokine-bioassays.pdf), the content of which is incorporated herein by reference in its entirety.

[0271] For example, in a cytokine-induced proliferation assay, samples (e.g., IL-2 moiety or IL-2 immunomodulatory molecule) and standard (e.g., IL-2 in free state) are diluted via serial dilution in an assay plate filled with culture medium, indicator cells (e.g., CTLL-2, or PBMC stimulated with anti-CD3 Ab) are washed and resuspend in culture medium then added into each well. The cells are incubated for sufficient time (e.g., 24 hours or longer) at 37° C., 5% CO₂ in a humidified incubator. Then cell viability test agents (e.g., resazurin, MTT assay agents) can be added to the plate and allow for sufficient incubation, then read with spectrophotometer. The EC50 values (concentration of test sample required to exhibit 50% of maximal response) for cell proliferation can then be obtained from non-linear regression analysis of dose-response curves. Cell number can also be counted under microscope, and compare to that treated with standard or control. For another example, in a cytokine-induced cytokine production assay, samples (e.g., IL-12 or IL-23 moiety, or IL-12 or IL-23 immunomodulatory molecule) and standard (e.g., IL-12 or IL-23 in free state) are diluted via serial dilution in an assay plate filled with culture medium, indicator cells (e.g., splenocytes, activated CD4+ T cells, or activated CD8+ T cells) are washed and resuspend in culture medium then added into each well. Cells are incubated for sufficient time (e.g., 24-48 hours) at 37° C., 5% CO₂ in a humidified incubator, then supernatants are harvest for determination of cytokine expression by ELISA, following ELISA protocol for target cytokine of interest (e.g., IFN-γ). For another example, in a cytokine-induced cell surface marker expression assay, samples (e.g., IFN-γ moiety, or IFN-γ immunomodulatory molecule) and standard (e.g., IFN-γ in free state) are diluted via serial dilution in an assay plate filled with culture medium, indicator cells (e.g., HEK-Blue™ IFN-γ cells) are washed and resuspend in culture medium then added into each well. Cells are incubated for sufficient time (e.g., 24-48 hours) at 37° C., 5% CO₂ in a humidified incubator, then cell surface expression of biomarker (e.g., PD-L1) can be detected (e.g., using anti-human PD-L1 APC-conjugated antibody) and measured by ELISA or FACS. Also see Example 1 for exemplary method.

[0272] Bioactivities of binding domains (e.g., cytokine moieties) or immunomodulatory molecules described herein can also be reflected by in vivo or ex vivo experiments, for example, by measuring the proliferation of indicator cells (e.g., after administering IL-2 moieties or IL-2 immunomodulatory molecules, the proliferation of CD8+ cells, NK cells, or Tregs); by measuring the induction or inhibition of cytokine secretion; by measuring tumor volume reduction in tumor xenograft mice after injecting the test cytokine moieties or immunomodulatory molecules described herein; or by measuring autoimmune score.

[0273] Cell signaling assays can also be used to test bioactivities of binding domains (e.g., cytokine moieties) or immunomodulatory molecules described herein. Various cell signaling assay kits are commercially available, for example, to detect analytes produced during enzymatic reactions involved in signaling such as ADP, AMP, UDP, GDP, and growth factors, or phosphatase assays, to quantify both total and phosphorylated forms of signaling proteins. For example, after incubating the cells with cytokine moieties or immunomodulatory molecules described herein, to determine whether a particular kinase is active, the cell lysate is exposed to a known substrate for the enzyme in the presence of radioactive phosphate. The products are separated by electrophoresis (with or without immunoprecipitation), then the gel is exposed to x-ray film to determine whether the proteins incorporated the isotope. In some embodiments, the bioactivities of binding domains (e.g., cytokine moieties) or immunomodulatory molecules described herein on cells are measured by immunohistochemistry to locate signaling proteins. For example, antibodies to the signal proteins themselves or signal proteins in their activated state can be used. These antibodies have recognition epitopes that include the phosphate or other activating conformation. In some embodiments, movement of specific signaling proteins (e.g., nuclear translocation of signaling molecules) can be tracked by incorporating a fluorescent protein gene, e.g., green fluorescent protein (GFP), into genetic vectors encoding the protein to be studied. In some embodiments, bioactivities of binding domains (e.g., cytokine moieties) or immunomodulatory molecules described herein on cells are tested by western blots. For example, all tyrosine-phosphorylated proteins (or other phosphorylated amino acids, e.g., serine or threonine) can be detected with an anti-phosphotyrosine antibody (or antibodies against other phosphorylated amino acids) on a Western blot of cell lysates obtained after stimulation in a temporal sequence. In some embodiments, the bioactivities of binding domains (e.g., cytokine moieties) or immunomodulatory molecules described herein on cells can be measured by immunoprecipitation. For example, primary antibodies to a specific signaling protein or all tyrosine-phosphorylated proteins are cross-linked to the beads. The cells after incubating with cytokine moieties or immunomodulatory molecules described herein are lysed in buffer containing protease inhibitors and then incubated with the antibody-coated beads. The proteins are separated by using SDS electrophoresis, and then the proteins are identified by using the procedures described for Western blots. In some embodiments, glutathione S-transferase (GST) binding, or “pull-down” assay, can also be used, which determines direct protein-protein (e.g., signaling protein) interactions. Cell-based signal transduction assays can also be used. Briefly, a reporter cell line (e.g., HEK-Blue™) stably expressing the corresponding receptor of the test cytokine moiety or immunomodulatory molecule, corresponding signaling factors of the cytokine signaling pathway (e.g., STAT, JAK), and cytokine signaling pathway-inducible reporter (e.g., fluorescent protein, or secreted embryonic alkaline phosphatase) can be cultured in the presence of the test cytokine moiety or immunomodulatory molecule at 37° C. in a CO₂ incubator for sufficient time (e.g., 24-48 hours), then the reporter can be detected, such as using microscopy or FACS for fluorescent protein, or to detect secreted embryonic alkaline phosphatase in cell culture medium using colorimetric enzyme assay for alkaline phosphatase activity (e.g., QUANTI-Blue™).

[0274] Using IL-2 as an example of the first binding domain, STAT5 and ERK1/2 signaling can be measured to reflect IL-2 moiety or immunomodulatory molecule bioactivity, for example, by measuring phosphorylation of STAT5 and ERK1/2 using any suitable method known in the art. For example, STAT5 and ERK1/2 phosphorylation can be measured using antibodies specific for the phosphorylated version of these molecules in combination with flow cytometry analysis. For example, freshly isolated PBMCs are incubated at 37° C. with IL-2 or variant thereof, or IL-2 immunomodulatory molecule. After incubation, cells are immediately fixed (e.g., with Cytofix buffer) to preserve the phosphorylation status and permeabilized (e.g., with Phosflow Perm buffer III). The cells are stained with fluorophore-labeled antibodies against phosphorylated STAT5 or ERK1/2, and analyzed by flow cytometry. Alternatively, test samples (e.g., IL-2 cytokine moieties or IL-2 immunomodulatory molecules described herein) can be injected i.p. into mice, then total splenocytes can be isolated, immediately fixed (e.g., Phosphoflow™ Lyse/Fix buffer), washed with ice cold PBS, stained using anti-CD4 and anti-CD25 antibodies, and then permeabilized (e.g., PhosFlow Perm Buffer III). Cells are then washed with ice-cold FACS buffer, stained with anti-FoxP3, washed with ice-cold FACS buffer, and stained with fluorophore-labeled anti-phospho-STAT5 at room temperature. Cells are washed with FACS buffer, then data can be acquired on a FACS cytometer and analyzed. PI 3-kinase signaling can be measured using any suitable method known in the art to reflect IL-2 bioactivity, too. For example, PI 3-kinase signaling can be measured using antibodies that are specific for phospho-S6 ribosomal protein in conjunction with flow cytometry analysis.

[0275] In some embodiments, the first binding domain (e.g., immunostimulatory cytokine moieties) or immunomodulatory molecules described herein is capable of activating an immune cell, such as inducing test cytokine (e.g., IL-2 moiety or IL-2 immunomodulatory molecule described herein) dependent immune cell (e.g., PBMC, NK cell, CD8+ T cell, Th17 cell) proliferation, differentiation, and/or activation, cytokine secretion, activating signaling transduction (e.g., inducing STAT5 phosphorylation, ERK1/2 phosphorylation, or stimulating PI 3-kinase signaling), and/or inducing immune cells to kill tumor cells or infected cells. In some embodiments, the second binding domain (e.g., immunosuppressive cytokine moieties) or immunomodulatory molecules described herein is capable of inhibiting an immune cell, such as inhibiting cytokine (e.g., pro-inflammatory cytokine) production, antigen presentation, or MHC molecule expression from the immune cell, or inhibiting or ameliorating signaling transduction. In some embodiments, the immune cell is selected from the group consisting of a monocyte, a dendritic cell, a macrophage, a B cell, a killer T cell (T_{c}, cytotoxic T lymphocyte, or CTL), a helper T cell (Th), a regulatory T cells (Treg), a γδ T cell, a natural killer T (NKT) cell, and a natural killer (NK) cell.

[0276] In some embodiments, the activity in activating/inhibiting (or up-regulating/down-regulating) an immune response of the variant binding domain (e.g., cytokine variant) in a free state is the same or similar (such as within about ±20% difference) of that of a corresponding wildtype or non-variant binding domain (e.g., wildtype cytokine) in a free state. In some embodiments, the variant binding domain (e.g., cytokine variant) comprises a mutation or a modification (e.g., post-translational modification), which reduces its activity in activating/inhibiting (or up-regulating/down-regulating) an immune response compared to the wildtype or non-variant binding domain (e.g., wildtype cytokine) (e.g., no more than about any of 80%, 70%, 60%, 50%, 40%, 30%, 20%, 10%, 9%, 8%, 7%, 6%, 5%, 4%, 3%, 2%, 1%, 0.9%, 0.8%, 0.7%, 0.6%, 0.5%, 0.4%, 0.3%, 0.2%, 0.1%, or 0% of the bioactivity of wildtype or non-variant binding domain (e.g., wildtype cytokine)), when in a free state or in the absence of second target molecule-second binding domain binding of the immunomodulatory molecule described herein. In some embodiments, in the presence of second target molecule-second binding domain binding of the immunomodulatory molecule described herein, the activity in activating/inhibiting (or up-regulating/down-regulating) an immune response of the variant binding domain (e.g., cytokine variant) is at least about 1% (such as at least about any of 2%, 3%, 4%, 5%, 6%, 7%, 8%, 9%, 10%, 20%, 30%, 40%, 50%, 60%, 70%, 80%, 90%, 100%, 110%, 120%, 130%, 140%, 150%, 160%, 170%, 180%, 190%, or 200%) of that of a corresponding wildtype or non-variant binding domain (e.g., wildtype cytokine).

### Hinge

[0277] Hinge connects the Fd region (V_{H} and CH1 domains) and the Fc region of a heavy chain of an immunoglobulin. In some embodiments, a hinge region connects a binding domain (e.g., ligand, receptor, VHH, scFv, or Fab) and an Fc domain subunit or portion thereof (e.g., CH2+CH3, or CH2 only). The hinge region, found in IgG, IgA, and IgD immunoglobulin classes, acts as a flexible spacer that allows the Fab portion of an immunoglobulin to move freely in space relative to the Fc region. The hinge domains are structurally diverse, varying in both sequence and length among immunoglobulin classes and subclasses. The heavy chains are inter-connected via disulfide bonds in the hinge region. According to crystallographic studies, the immunoglobulin hinge region can be further subdivided structurally and functionally into three regions: the upper hinge, the core, and the lower hinge. See Shin et al., Immunological Reviews 130:87 (1992). The upper hinge includes amino acids from the carboxyl end of CH1 to the first residue in the hinge that restricts motion, generally the first cysteine residue that forms an interchain disulfide bond between the two heavy chains. The length of the upper hinge region correlates with the segmental flexibility of the antibody. The core hinge region contains the inter-heavy chain disulfide bridges. The lower hinge region joins the amino terminal end of, and includes residues in, the CH2 domain. Id. The hinge region of a human IgG1 antibody corresponds to amino acids 216-230 according to the EU numbering as set forth in Kabat. The core hinge region of human IgG₁ contains the sequence Cys-Pro-Pro-Cys that, when dimerized by disulfide bond formation, results in a cyclic octapeptide believed to act as a pivot, thus conferring flexibility. Conformational changes permitted by the structure and flexibility of the immunoglobulin hinge region polypeptide sequence may affect the effector functions of the Fc portion of the antibody.

[0278] In some embodiments, the hinge region may contain one or more glycosylation site(s), which include a number of structurally distinct types of sites for carbohydrate attachment. For example, IgA₁ contains five glycosylation sites within a 17 amino acid segment of the hinge region, conferring exceptional resistance of the hinge region polypeptide to intestinal proteases, considered an advantageous property for a secretory immunoglobulin.

[0279] In some embodiments, the immunomodulatory molecule comprises a hinge region that is present in a naturally occurring parental antibody. For example, the parental antibody is an IgG1 antibody, and the hinge region of the antibody or antigen-binding fragment within the immunomodulatory molecule described herein is an IgG1-type hinge region. In some embodiments, the immunomodulatory molecule contains a modification of the antibody heavy chain hinge region. For example, the hinge region or a portion thereof has been modified, e.g., by deletion, insertion, or replacement, e.g., with a hinge region or a portion thereof which differs from the hinge region present in a naturally occurring antibody of the same class (e.g., IgG, IgA, or IgE) and subclass (e.g., IgG₁, IgG₂, IgG₃, and IgG₄, etc.). For example, an IgG1, IgG2, or IgG3 antibody may contain an IgG4-type hinge region. In some embodiments, the hinge region or a portion thereof comprises a mutation, e.g., deletion, insertion, or replacement, at one or more of the upper hinge, the core, and the lower hinge of the hinge region, as long as inter-chain disulfide bond(s) can still be formed, the immunomodulatory molecule has flexibility to ensure target antigen-antigen binding fragment binding, masking cytokine activity in the absence of target antigen-antibody binding, while unmasking cytokine activity in the presence of target antigen-antibody binding, providing flexibility and/or sufficient space between two cytokine subunits or two cytokine moieties to ensure proper cytokine activity (binding affinity and/or bioactivity), and/or optionally does not abolish effector function(s) of the Fc portion. In some embodiments, the hinge region is or is derived from a human IgG1, IgG2, IgG3, or IgG4 hinge. In some embodiments, the hinge region is a mutated human IgG1, IgG2, IgG3, or IgG4 hinge. In some embodiments, one or more mutations, e.g., deletion, insertion, or replacement, are introduced at one or more of the upper hinge, the core, and the lower hinge of the hinge region in order to reduce or eliminate effector function (e.g., ADCC, and/or CDC) of the Fc domain, such as L234 and/or L235 mutations in the IgG1 lower hinge region, e.g., one or two of L234A, L234K, L234D, L235E, L235K, and L235A mutations. In some embodiments, the hinge region comprises L234K and L235K mutations. In some embodiments, the hinge region comprises L234D and L235E mutations. In some embodiments, the hinge region is truncated or mutated with less cysteines in order to reduce disulfide bond mis-pairing during dimerization of the Fc domain. In some embodiments, one or more asymmetric charged mutation(s) is introduced into the lower hinge to facilitate heterodimer formation, e.g., one polypeptide comprises L234K+L235K in the IgG1 lower hinge region, while the pairing polypeptide comprises L234D+L235E in the IgG1 lower hinge region. In some embodiments, the hinge region comprises the amino acid sequence of EPKSCDKTHTCPPCPAPELLGGP (SEQ ID NO: 76). In some embodiments, the hinge region is an IgG1 hinge comprising L234K and L235K mutations. In some embodiments, the hinge region comprises the amino acid sequence of EPKSCDKTHTCPPCPAPEKKGGP (SEQ ID NO: 77). In some embodiments, the hinge region is an IgG1 hinge comprising L234D and L235E mutations. In some embodiments, the hinge region comprises the amino acid sequence of EPKSCDKTHTCPPCPAPEDEGGP (SEQ ID NO: 78). In some embodiments, the hinge region comprises the amino acid sequence of ERKCCVECPPCPAPPVAGP (SEQ ID NO: 82). In some embodiments, the hinge region comprises the amino acid sequence of ESKYGPPCPSCPAPEFLGGP (SEQ ID NO: 83). In some embodiments, the hinge region comprises the amino acid sequence of ESKYGPPCPPCPAPEFLGGP (SEQ ID NO: 94). In some embodiments, the hinge region comprises the amino acid sequence of any of EPKSCDKDKTHTCPPCPAPELLGGP (SEQ ID NO: 79), EPKSCDKDKTHTCPPCPAPEKKGGP (SEQ ID NO: 80), or EPKSCDKDKTHTCPPCPAPEDEGGP (SEQ ID NO: 81). In some embodiments, the hinge region comprises the amino acid sequence of any of EPKSCDKPDKTHTCPPCPAPELLGGP (SEQ ID NO: 91), EPKSCDKPDKTHTCPPCPAPEKKGGP (SEQ ID NO: 92), EPKSCDKPDKTHTCPPCPAPEDEGGP (SEQ ID NO: 93), or EPPKSCDKTHTCPPCPAPELLGGP (SEQ ID NO: 95). In some embodiments, the hinge region, such as the hinge N′ portion, comprises the amino acid sequence of any of EPKSCDKP (SEQ ID NO: 90), EPKSCDK (SEQ ID NO: 84), or EPKSC (SEQ ID NO: 85). In some embodiments, the hinge region comprises the amino acid sequence of DKTHT (SEQ ID NO: 89). In some embodiments, the hinge region, such as the hinge C′ portion, comprises the amino acid sequence of any of DKTHTCPPCPAPELLGGP (SEQ ID NO: 86), DKTHTCPPCPAPEKKGGP (SEQ ID NO: 87), or DKTHTCPPCPAPEDEGGP (SEQ ID NO: 88). In some embodiments, the hinge comprises the sequence of any of SEQ ID NO: 76-95.

[0280] In some embodiments, the first binding domain (e.g., cytokine or variant thereof) described herein is positioned at the N-terminus of the hinge region of a heavy chain of a full-length antibody comprising the second binding domain, i.e., positioned between the C-terminus of the CH1 and the N-terminus of the hinge region of the heavy chain of the full-length antibody. In some embodiments, the heavy chain fusion polypeptide comprises from N′ to C′: VH-CH1—first binding domain (e.g., cytokine moiety)-hinge-CH2-CH3. In some embodiments, the first binding domain (e.g., cytokine or variant thereof) is positioned at the N-terminus of the hinge region between a second binding domain (e.g., ligand, receptor, VHH, scFv, or Fab) and an Fc domain subunit or portion thereof (e.g., CH2-CH3, or CH2). For example, in some embodiments, the immunomodulatory molecule comprises a polypeptide of any of from N′ to C′: (1) VH-first binding domain (e.g., cytokine moiety)-hinge-CH2-CH3; (2) VL-first binding domain (e.g., cytokine moiety)-hinge-CH2-CH3; (3) VH-optional linker-VL-first binding domain (e.g., cytokine moiety)-hinge-CH2-CH3; (4) VL-optional linker-VH-first binding domain (e.g., cytokine moiety)-hinge-CH2-CH3; (5) VH-CH1-first binding domain (e.g., cytokine moiety)-hinge-CH2-CH3; (6) VH-first binding domain (e.g., cytokine moiety)-hinge-CH2; (7) VL-cytokine moiety-hinge-CH2; (8) VH-optional linker-VL-first binding domain (e.g., cytokine moiety)-hinge-CH2; (9) VL-optional linker-VH-first binding domain (e.g., cytokine moiety)-hinge-CH2; (10) VH-CH1-first binding domain (e.g., cytokine moiety)-hinge-CH2; (11) ligand-optional linker-first binding domain (e.g., cytokine moiety)-hinge-CH2-CH3; (12) ligand-optional linker-first binding domain (e.g., cytokine moiety)-hinge-CH2; (13) receptor-optional linker-first binding domain (e.g., cytokine moiety)-hinge-CH2-CH3; or (14) receptor-optional linker-first binding domain (e.g., cytokine moiety)-hinge-CH2.

[0281] In some embodiments, the first binding domain (e.g., cytokine or variant thereof) described herein is positioned at the C-terminus of the hinge region of a heavy chain of a full-length antibody comprising the second binding domain, i.e., the heavy chain fusion polypeptide comprises from N′ to C′: VH-CH1-hinge-first binding domain (e.g., cytokine moiety)-CH2-CH3. In some embodiments, the first binding domain (e.g., cytokine or variant thereof) is positioned at the C-terminus of the hinge region between a second binding domain (e.g., ligand, receptor, VHH, scFv, or Fab) and an Fc domain subunit or portion thereof (e.g., CH2). For example, in some embodiments, the immunomodulatory molecule comprises a polypeptide of any of from N′ to C′: (1) VH-hinge-first binding domain (e.g., cytokine moiety)-CH2-CH3; (2) VL-hinge-first binding domain (e.g., cytokine moiety)-CH2-CH3; (3) VH-optional linker-VL-hinge-first binding domain (e.g., cytokine moiety)-CH2-CH3; (4) VL-optional linker-VH-hinge-first binding domain (e.g., cytokine moiety)-CH2-CH3; (5) VH-CH1-hinge-first binding domain (e.g., cytokine moiety)-CH2-CH3; (6) VH-hinge-first binding domain (e.g., cytokine moiety)-CH2; (7) VL-hinge-first binding domain (e.g., cytokine moiety)-CH2; (8) VH-optional linker-VL-hinge-first binding domain (e.g., cytokine moiety)-CH2; (9) VL-optional linker-VH-hinge-first binding domain (e.g., cytokine moiety)-CH2; (10) VH-CH1-hinge-first binding domain (e.g., cytokine moiety)-CH2; (11) ligand-hinge-first binding domain (e.g., cytokine moiety)-CH2-CH3; (12) ligand-hinge-first binding domain (e.g., cytokine moiety)-CH2; (13) receptor-hinge-first binding domain (e.g., cytokine moiety)-CH2-CH3; or (14) receptor-hinge-first binding domain (e.g., cytokine moiety)-CH2.

[0282] In some embodiments, the first binding domain (e.g., cytokine or variant thereof) described herein is positioned within the hinge region of a heavy chain of a full-length antibody comprising the second binding domain, i.e., the heavy chain fusion polypeptide comprises from N′ to C′: VH-CH1-hinge N′ portion-first binding domain (e.g., cytokine moiety)-hinge C′ portion-CH2-CH3. In some embodiments, the cytokine or variant thereof replaces a portion of the hinge region. In some embodiments, the cytokine or variant thereof is inserted within the hinge region, without deleting any hinge amino acid. In some embodiments, the cytokine or variant thereof with a peptide linker fused to the N′ of the cytokine or variant thereof is inserted within the hinge region. In some embodiments, the cytokine or variant thereof with a peptide linker fused to the C′ of the cytokine or variant thereof is inserted within the hinge region. For example, in some embodiments, the hinge-cytokine portion comprises a structure of from N′ to C′: hinge N′ portion-optional N′ peptide linker-first binding domain (e.g., cytokine moiety)-optional C′ peptide linker-hinge C′ portion. In some embodiments, the hinge region is an IgG1 hinge, and the cytokine or variant thereof is inserted between “EPKSC” (SEQ ID NO: 85) and “DKTHT” (SEQ ID NO: 89). In some embodiments, the N′ peptide linker comprises the amino acid sequence of DKP (SEQ ID NO: 231) or P (SEQ ID NO: 242). Hence in some embodiments, the cytokine or variant thereof is inserted between an additionally introduced “DKP” and the “DKTHT” sequence. In some embodiments, the N′ peptide linker comprises the amino acid sequence of DKPGS (SEQ ID NO: 232), PGS (SEQ ID NO: 233), or GS (SEQ ID NO: 234). In some embodiments, the N′ peptide linker comprises the amino acid sequence of DKPGSG (SEQ ID NO: 235), PGSG (SEQ ID NO: 236), or GSG (SEQ ID NO: 203). In some embodiments, the N′ peptide linker comprises the amino acid sequence of DKPGSGS (SEQ ID NO: 237), PGSGS (SEQ ID NO: 238), or GSGS (SEQ ID NO: 239). In some embodiments, the N′ peptide linker comprises the amino acid sequence of DKPGSGGGGG (SEQ ID NO: 240), PGSGGGGG (SEQ ID NO: 241), GSGGGGG (SEQ ID NO: 206).In some embodiments, the cytokine or variant thereof is positioned within the hinge region between an antigen-binding fragment (e.g., ligand, receptor, VHH, scFv, or Fab) and an Fc domain subunit or portion thereof (e.g., CH2). For example, in some embodiments, the immunomodulatory molecule comprises a polypeptide of any of from N′ to C′: (1) VH-hinge N′ portion-optional N′ peptide linker-first binding domain (e.g., cytokine moiety)-optional C′ peptide linker-hinge C′ portion-CH2-CH3; (2) VL-hinge N′ portion-optional N′ peptide linker-first binding domain (e.g., cytokine moiety)-optional C′ peptide linker-hinge C′ portion-CH2-CH3; (3) VH-optional linker-VL-hinge N′ portion-optional N′ peptide linker-first binding domain (e.g., cytokine moiety)-optional C′ peptide linker-hinge C′ portion-CH2-CH3; (4) VL-optional linker-VH-hinge N′ portion-optional N′ peptide linker-first binding domain (e.g., cytokine moiety)-optional C′ peptide linker-hinge C′ portion-CH2-CH3; (5) VH-CH1-hinge N′ portion-optional N′ peptide linker-first binding domain (e.g., cytokine moiety)-optional C′ peptide linker-hinge C′ portion-CH2-CH3; (6) VH-hinge N′ portion-optional N′ peptide linker-first binding domain (e.g., cytokine moiety)-optional C′ peptide linker-hinge C′ portion-CH2; (7) VL-hinge N′ portion-optional N′ peptide linker-first binding domain (e.g., cytokine moiety)-optional C′ peptide linker-hinge C′ portion-CH2; (8) VH-optional linker-VL-hinge N′ portion-optional N′ peptide linker-first binding domain (e.g., cytokine moiety)-optional C′ peptide linker-hinge C′ portion-CH2; (9) VL-optional linker-VH-hinge N′ portion-optional N′ peptide linker-first binding domain (e.g., cytokine moiety)-optional C′ peptide linker-hinge C′ portion-CH2; (10) VH-CH1-hinge N′ portion-optional N′ peptide linker-first binding domain (e.g., cytokine moiety)-optional C′ peptide linker-hinge C′ portion-CH2; (11) ligand-optional linker-hinge N′ portion-optional N′ peptide linker-first binding domain (e.g., cytokine moiety)-optional C′ peptide linker-hinge C′ portion-CH2-CH3; (12) ligand-optional linker-hinge N′ portion-optional N′ peptide linker-first binding domain (e.g., cytokine moiety)-optional C′ peptide linker-hinge C′ portion-CH2; (13) receptor-optional linker-hinge N′ portion-optional N′ peptide linker-first binding domain (e.g., cytokine moiety)-optional C′ peptide linker-hinge C′ portion-CH2-CH3; or (14) receptor-optional linker-hinge N′ portion-optional N′ peptide linker-first binding domain (e.g., cytokine moiety)-optional C′ peptide linker-hinge C′ portion-CH2.

### Fc Domains

[0283] In some embodiments, the immunomodulatory molecule descried herein comprises an Fc domain or portion thereof. Fc domain comprises a CH2 domain and a CH3 domain. In some embodiments, the Fc domain portion comprises (consists essentially of or consists of) a CH2 domain. In some embodiments, the Fc domain portion comprises (consists essentially of or consists of) a CH3 domain.

[0284] In some embodiments, the Fc domain is derived from any of IgA, IgD, IgE, IgG, and IgM, and subtypes thereof. In some embodiments, the Fc domain comprises CH2 and CH3. In some embodiments, the Fc domain is derived from an IgG (e.g., IgG1, IgG2, IgG3, or IgG4). In some embodiments, the Fc domain is derived from a human IgG. In some embodiments, the Fc domain is derived from a human IgG1 or human IgG4. In some embodiments, the two subunits of the Fc domain dimerize via one or more (e.g., 1, 2, 3, 4, or more) disulfide bonds. In some embodiments, each subunit of the Fc domain comprises a full-length Fc sequence. In some embodiments, each subunit of the Fc domain comprises an N-terminus truncated Fc sequence. In some embodiments, the Fc domain is truncated at the N-terminus, e.g., lacks the first 1, 2, 3, 4, 5, 6, 7, 8, 9, or 10 amino acids of a complete immunoglobulin Fc domain. In some embodiments, the Fc domain comprises the amino acid sequence of any of SEQ ID NOs: 96-102.

[0285] Via the Fc domain, immunomodulatory molecules can activate complement and interact with Fc receptors. This inherent immunoglobulin feature has been viewed unfavorably because immunomodulatory molecules may be targeted to cells expressing Fc receptors rather than the preferred antigen-bearing cells. Moreover, the simultaneous activation of cytokine receptors and Fc receptor signaling pathways leading to cytokine release, especially in combination with the long half-life of immunoglobulin fusion proteins, make their application in a therapeutic setting difficult due to systemic toxicity. Thus in some embodiments, the Fc domain is engineered to have altered binding to an Fc receptor (FcR), specifically altered binding to an Fcγ receptor, and/or altered effector function, such as altered (e.g., reduced or eliminated) antibody-dependent cell-mediated cytotoxicity (ADCC), Antibody-dependent Cellular Phagocytosis (ADCP), and/or Complement-dependent cytotoxicity (CDC).

[0286] Although the presence of an Fc domain is essential for prolonging the half-life of the immunomodulatory molecule, in some situations it will be beneficial to eliminate effector functions associated with engagement of Fc receptors by the Fc domain. Hence, in some embodiments the altered binding to an Fc receptor and/or effector function is reduced binding and/or effector function. In some embodiments, the Fc domain comprises one or more amino acid mutation that reduces the binding of the Fc domain to an Fc receptor, particularly an Fcγ receptor (responsible for ADCC). Preferably, such an amino acid mutation does not reduce binding to FcRn receptors (responsible for half-life). In some embodiments, the Fc domain is derived from human IgG1 and comprises the amino acid substitution N295A. In some embodiments, the Fc domain is derived from human IgG4 and comprises the amino acid substitutions S228P and L235E at the hinge region. In some embodiments, the Fc domain is derived from human IgG1 and comprises the amino acid substitutions L234A and L235A (“LALA”) at the hinge region. In some embodiments, the Fc domain is derived from human IgG1 and comprises the amino acid substitutions L234A and L235A at the hinge region, and P329G, e.g., in each of its subunits. See, e.g., Lo M. et al. J Biol Chem. 2017 Mar. 3; 292(9):3900-3908. Schlothauer T. et al. Protein Eng Des Sel. 2016 October; 29(10):457-466.

[0287] In some embodiments, the Fc domain (e.g., human IgG1) is mutated to remove one or more effector functions such as ADCC, ADCP, or CDC, namely, an “effectorless” or “almost effectorless” Fc domain. For example, in some embodiments, the Fc domain is an effectorless IgG1 Fc comprising one or more of the following mutations (such as in each of its subunits): L234A, L235E, G237A, A330S, and P331S. The combinations of K322A, L234A, and L235A in IgG1 are sufficient to almost completely abolish FcγR and C1q binding (Hezareh et al. J Virol 75, 12161-12168, 2001). MedImmune identified that a set of three mutations L234F/L235E/P331S have a very similar effect (Oganesyan et al., Acta Crystallographica 64, 700-704, 2008). In some embodiments, the Fc domain comprises a modification of the glycosylation on N297 of the IgG1 Fc domain, which is known to be required for optimal FcR interaction. The Fc domain modification can be any suitable IgG Fc engineering mentioned in Wang et al. (“IgG Fc engineering to modulate antibody effector functions,” Protein Cell. 2018 January; 9(1): 63-73), the content of which is incorporated herein by reference in its entirety.

[0288] In some embodiments, the Fc domain comprises two identical polypeptide chains (identical Fc subunits). Such Fc domains are herein also referred to as “homodimeric Fc domains.” In some embodiments, each subunit of the homodimeric Fc domain comprises the amino acid sequence of any of SEQ ID NOs: 96, and 99-102.

[0289] In some embodiments, the Fc domain comprises a modification promoting heterodimerization of two non-identical polypeptide chains. Such Fc domains are herein also referred to as “heterodimeric Fc domains.” In some embodiments, the Fc domain comprises a knob-into-hole (KIH) modification, comprising a knob modification in one of the subunits of the Fc domain and a hole modification in the other one of the two subunits of the Fc domain. Any suitable knob-into-hole modifications can be applied to the immunomodulatory molecule described herein, such as amino acid changes of T22>Y (creating the knob) in strand B of the first CH3 domain and Y86>T (creating the hole) in strand E of the partner CH3 domain. Also see US20200087414, the content of which is incorporated herein by reference in its entirety. In some embodiments, one subunit of the Fc domain comprises one or more of T350V, L351Y, S400E, F405A, and Y407V mutations relative to a wildtype human IgG1 Fc, and the other subunit of the Fc domain comprises one or more of T350V, T366L, N390R, K392M, T394W mutations relative to a wildtype human IgG1 Fc. In some embodiments, one subunit of the Fc domain comprises the sequence of SEQ ID NO: 97, and the other subunit of the Fc domain comprises the sequence of SEQ ID NO: 98.

[0290] In some embodiments, the Fc domain is a single chain Fc domain as described in WO2017134140, the content of which is incorporated herein by reference in its entirety.

### Linkers

[0291] In some embodiments, within the immunomodulatory molecule described herein, between the two or more binding domains connected in tandem, the second binding domain (e.g., ligand, receptor, VHH, scFv, or Fab) and the first binding domain (e.g., cytokine moiety), the first binding domain (e.g., cytokine moiety) and CL, the first binding domain (e.g., cytokine moiety) and VH, the first binding domain (e.g., cytokine moiety) and VL, the CH1 domain and the first binding domain (e.g., cytokine moiety), the two or more first binding domains (e.g., cytokine moiety) connected in tandem, the two or more subunits of a cytokine or variant thereof connected in tandem, the first binding domain (e.g., cytokine moiety) and the Fc domain subunit or portion thereof, the hinge region and the CH1 domain, the hinge region and the CH2 domain, the hinge region and the first binding domain (e.g., cytokine moiety), the Fc domain subunit or portion thereof and the antigen-binding fragment, and/or the CH1 domain and the Fc domain subunit or portion thereof, are connected via one or more optional linkers (e.g., peptide linker, non-peptide linker). In some embodiments, the one or more linkers are the same. In some embodiments, the one or more linkers are different (e.g., different from each other). In some embodiments, the one or more linkers are flexible linkers. In some embodiments, the one or more linkers are stable linkers. In some embodiments, some of the linkers are flexible, while others are stable. In general, a linker does not affect or significantly affect the proper fold and conformation formed by the configuration of the immunomodulatory molecule. In some embodiments, the linker confers flexibility and spatial space for each portion of the immunomodulatory molecule, such as allows target antigen-antigen binding fragment binding, allows ligand-receptor binding, masking first binding domain (e.g., cytokine) activity in the absence of second target molecule-second binding domain binding, while unmasking first binding domain (e.g., cytokine) activity in the presence of second target molecule-second binding domain binding, providing flexibility and/or sufficient space between two binding domains or domain subunits (e.g., cytokine subunits or two cytokine moieties) to ensure proper binding domain (e.g., cytokine) activity (binding affinity and/or bioactivity), etc.

[0292] The linkers can be peptide linkers of any length. In some embodiments, the peptide linker is from about 1 amino acid (aa) to about 10 aa long, from about 2 aa to about 15 aa long, from about 3 aa to about 12 aa long, from about 4 aa to about 10 aa long, from about 5 aa to about 9 aa long, from about 6 aa to about 8 aa long, from about 1 amino acid to about 20 aa long, from about 21 aa to about 30 aa long, from about 1 amino acid to about 30 aa long, from about 2 aa to about 20 aa long, from about 10 aa to about 30 as long, from about 1 amino acid to about 50 aa long, from about 2 aa to about 19 aa long, from about 2 aa to about 18 aa long, from about 2 aa to about 17 aa long, from about 2 aa to about 16 as long, from about 2 aa to about 10 aa long, from about 2 aa to about 14 aa long, from about 2 aa to about 13 aa long, from about 2 aa to about 12 as long, from about 2 aa to about 11 aa long, from about 2 aa to about 9 aa long, from about 2 aa to about 8 aa long, from about 2 aa to about 7 aa long, from about 2 aa to about 6 aa long, from about 2 as to about 5 aa long, or from about 6 aa to about 30 aa long. In some embodiments, the peptide linker is about any of 1, 2, 3, 4, 5, 6, 7, 8, 9, 10, 11, 12, 13, 14, 15, 16, 17, 18, 19 or 20 amino acids long. In some embodiments, the peptide linker is about any of 21, 22, 23, 24, 25, 26, 27, 28, 29, or 30 amino acids long. In some embodiments, the peptide linker is about any of 31, 32, 33, 34, 35, 36, 37, 38, 39, 40, 41, 42, 43, 44, 45, 46, 47, 48, 49, or 50 amino acids long. In some embodiments, the linker is about 10 to about 20 amino acids in length.

[0293] A peptide linker can have a naturally occurring sequence or a non-naturally occurring sequence. For example, a sequence derived from the hinge region of a heavy chain only antibody can be used as a linker. See, for example, WO1996/34103. In some embodiments, the peptide linker is a human IgG1, IgG2, IgG3, or IgG4 hinge or portion thereof. In some embodiments, the peptide linker is a mutated human IgG1, IgG2, IgG3, or IgG4 hinge or portion thereof. In some embodiments, the linker is a flexible linker. Exemplary flexible linkers include, but are not limited to, glycine polymers (G)ₙ (SEQ ID NO: 194), glycine-serine polymers (including, for example, (GS)ₙ (SEQ ID NO: 195), (GGS)ₙ (SEQ ID NO: 196), (GGGS)ₙ (SEQ ID NO: 197), (GGS)ₙ(GGGS)ₙ (SEQ ID NO: 198), (GSGGS)ₙ (SEQ ID NO: 199), (GGSGS)ₙ (SEQ ID NO: 200), or (GGGGS)ₙ (SEQ ID NO: 201), where n is an integer of at least one), glycine-alanine polymers, alanine-serine polymers, and other flexible linkers known in the art. Glycine and glycine-serine polymers are relatively unstructured, and therefore may be able to serve as a neutral tether between components. Glycine accesses significantly more phi-psi space than even alanine and is much less restricted than residues with longer side chains (see Scheraga, Rev. Computational Chem. 11 173-142 (1992)). Exemplary flexible linkers include, but are not limited to GG (SEQ ID NO. 202), GSG (SEQ ID NO: 203), GGSG (SEQ ID NO: 204), GGSGG (SEQ ID NO: 205), GSGGGGG (SEQ ID NO: 206), GSGSG (SEQ ID NO: 207), GSGGG (SEQ ID NO. 208), GGGSG (SEQ ID NO: 209), GSSSG (SEQ ID NO: 210), GGSGGS (SEQ ID NO: 211), SGGGGS (SEQ ID NO: 212), GGGGS (SEQ ID NO: 213), (GA)ₙ (SEQ ID NO: 214, n is an integer of at least 1), GRAGGGGAGGGG (SEQ ID NO: 215), GRAGGG (SEQ ID NO: 216), GSGGGSGGGGSGGGGS (SEQ ID NO: 217), GGGSGGGGSGGGGS (SEQ ID NO: 218), GGGSGGSGGS (SEQ ID NO: 219), GGSGGSGGSGGSGGG (SEQ ID NO: 220), GGSGGSGGGGSGGGGS (SEQ ID NO: 221), GGSGGSGGSGGSGGSGGS (SEQ ID NO: 222), GGGGSGGGGSGGGGS (SEQ ID NO: 229), GGGGGGSGGGGSGGGGSA (SEQ ID NO: 223), GSGGGSGGGGSGGGGSGGGGS (SEQ ID NO: 224), KTGGGSGGGS (SEQ ID NO: 225), GGPGGGGSGGGSGGGGS (SEQ ID NO: 226), GGGSGGGGSGGGGSGGGGS (SEQ ID NO: 227), GGGGSGGGGSGGGGSGGGGSG (SEQ ID NO: 228), and the like. In some embodiments, the linker comprises the sequence of ASTKGP (SEQ ID NO: 230). In some embodiments, the linker comprises the sequence of any one of SEQ ID NOs: 194-246. The ordinarily skilled artisan will recognize that design of an immunomodulatory molecule can include linkers that are all or partially flexible, such that the linker can include a flexible linker portion as well as one or more portions that confer less flexible structure to provide a desired immunomodulatory molecule structure and function (e.g., masking cytokine activity in the absence of target antigen-antibody binding, while unmasking cytokine activity in the presence of target antigen-antibody binding; or providing flexibility and/or sufficient space between two cytokine subunits to ensure proper cytokine activity (binding affinity and/or bioactivity)). In some embodiments, the peptide linker is enriched in serine-glycine. In some embodiments, the cytokine moiety described herein comprises two cytokine subunits (wildtype or mutant) connected by a linker, such as a peptide linker comprising any of SEQ ID NOs: 227-229, 245, and 246.

[0294] In some embodiments, the linker is a stable linker (e.g., not cleavable by protease, especially MMPs).

[0295] Any one or all of the linkers described herein can be accomplished by any chemical reaction that will connect the two or more binding domains connected in tandem, between the second binding domain (e.g., ligand, receptor, VHH, scFv, or Fab) and the first binding domain (e.g., cytokine moiety), between the first binding domain (e.g., cytokine moiety) and CL, the first binding domain (e.g., cytokine moiety) and VH, the first binding domain (e.g., cytokine moiety) and VL, the CH1 domain and the first binding domain (e.g., cytokine moiety), the two or more first binding domains (e.g., cytokine moiety) connected in tandem, the two or more subunits of a cytokine or variant thereof connected in tandem, the first binding domain (e.g., cytokine moiety) and the Fc domain subunit or portion thereof, the hinge region and the CH1 domain, the hinge region and the CH2 domain, the hinge region and the first binding domain (e.g., cytokine moiety), the Fc domain subunit or portion thereof and the antigen-binding fragment, and/or the CH1 domain and the Fc domain subunit or portion thereof, so long as the components or fragments retain their respective activities, i.e. binding to cytokine receptor, binding to target antigen(s), binding to ligand or receptor, binding to FcR, or ADCC. This linkage can include many chemical mechanisms, for instance covalent binding, affinity binding, intercalation, coordinate binding and complexation. In some embodiments, the binding is covalent binding. Covalent binding can be achieved either by direct condensation of existing side chains or by the incorporation of external bridging molecules. Many bivalent or polyvalent linking agents are useful in coupling protein molecules. For example, representative coupling agents can include organic compounds such as thioesters, carbodiimides, succinimide esters, diisocyanates, glutaraldehyde, diazobenzenes and hexamethylene diamines. This listing is not intended to be exhaustive of the various classes of coupling agents known in the art but, rather, is exemplary of the more common coupling agents (see Killen and Lindstrom, Jour. Immun. 133:1335-2549 (1984); Jansen et al., Immunological Reviews 62:185-216 (1982); and Vitetta et al., Science 238:1098 (1987)).

[0296] Linkers that can be applied in the present application are described in the literature (see, for example, Ramakrishnan, S. et al., Cancer Res. 44:201-208 (1984) describing use of MBS (M-maleimidobenzoyl-N-hydroxysuccinimide ester)). In some embodiments, non-peptide linkers used herein include: (i) EDC (1-ethyl-3-(3-dimethylamino-propyl) carbodiimide hydrochloride; (ii) SMPT (4-succinimidyloxycarbonyl-alpha-methyl-alpha-(2-pyridyl-dithio)-toluene (Pierce Chem. Co., Cat. (21558G); (iii) SPDP (succinimidyl-6 [3-(2-pyridyldithio) propionamido]hexanoate (Pierce Chem. Co., Cat #21651G); (iv) Sulfo-LC-SPDP (sulfosuccinimidyl 6 [3-(2-pyridyldithio)-propianamide] hexanoate (Pierce Chem. Co. Cat. #2165-G); and (v) sulfo-NHS (N-hydroxysulfo-succinimide: Pierce Chem. Co., Cat. #24510) conjugated to EDC.

[0297] The linkers described above can contain components that have different attributes, thus leading to immunomodulatory molecules with differing physio-chemical properties. For example, sulfo-NHS esters of alkyl carboxylates are more stable than sulfo-NHS esters of aromatic carboxylates. NHS-ester containing linkers are less soluble than sulfo-NHS esters. Further, the linker SMPT contains a sterically hindered disulfide bond, and can form fusion protein with increased stability. Disulfide linkages, are in general, less stable than other linkages because the disulfide linkage is cleaved in vitro, resulting in less fusion protein available. Sulfo-NHS, in particular, can enhance the stability of carbodiimide couplings. Carbodiimide couplings (such as EDC) when used in conjunction with sulfo-NHS, forms esters that are more resistant to hydrolysis than the carbodiimide coupling reaction alone.

[0298] Other linker considerations include the effect on physical or pharmacokinetic properties of the resulting immunomodulatory molecule, such as solubility, lipophilicity, hydrophilicity, hydrophobicity, stability (more or less stable as well as planned degradation), rigidity, flexibility, immunogenicity, modulation of cytokine moiety/cytokine receptor binding, modulation of antigen-binding domain/target antigen binding, modulation of ligand-receptor binding, the ability to be incorporated into a micelle or liposome, and the like.

### Immunomodulatory Molecule Variants

### Glycosylation Variants

[0299] In some embodiments, the immunomodulatory molecule is altered to increase or decrease the extent to which the construct is glycosylated. Addition or deletion of glycosylation sites to an Fc domain may be conveniently accomplished by altering the amino acid sequence such that one or more glycosylation sites is created or removed.

[0300] Native antibodies produced by mammalian cells typically comprise a branched, biantennary oligosaccharide that is generally attached by an N-linkage to Asn297 of the C_{H}2 domain of the Fc region. See, e.g., Wright et al. TIBTECH 15:26-32 (1997). The oligosaccharide may include various carbohydrates, e.g., mannose, N-acetyl glucosamine (GlcNAc), galactose, and sialic acid, as well as a fucose attached to a GlcNAc in the “stem” of the biantennary oligosaccharide structure. In some embodiments, modifications of the oligosaccharide in an Fc domain may be made in order to create certain improved properties.

[0301] In some embodiments, the immunomodulatory molecule described herein is provided having a carbohydrate structure that lacks fucose attached (directly or indirectly) to the Fc domain. For example, the amount of fucose in such immunomodulatory molecule may be from 1% to 80%, from 1% to 65%, from 5% to 65% or from 20% to 40/c. The amount of fucose is determined by calculating the average amount of fucose within the sugar chain at Asn297, relative to the sum of all glycostructures attached to Asn 297 (e.g., complex, hybrid and high mannose structures) as measured by MALDI-TOF mass spectrometry, as described in WO 2008/077546, for example. Asn297 refers to the asparagine residue located at about position 297 in the Fc domain (EU numbering of Fc region residues); however, Asn297 may also be located about f 3 amino acids upstream or downstream of position 297, i.e., between positions 294 and 300, due to minor sequence variations in antibodies. Such fucosylation variants may have improved ADCC function. See, e.g., US Patent Publication Nos. US 2003/0157108 (Presta, L.); US 2004/0093621 (Kyowa Hakko Kogyo Co., Ltd). Examples of publications related to “defucosylated” or “fucose-deficient” antibody variants include: US 2003/0157108; WO 2000/61739; WO 2001/29246; US 2003/0115614; US 2002/0164328; US 2004/0093621; US 2004/0132140; US 2004/0110704; US 2004/0110282; US 2004/0109865; WO 2003/085119; WO 2003/084570; WO 2005/035586; WO 2005/035778; WO2005/053742; WO2002/031140; Okazaki et al. J. Mol. Biol. 336:1239-1249 (2004); Yamane-Ohnuki et al. Biotech. Bioeng. 87: 614 (2004). Examples of cell lines capable of producing defucosylated antibodies include Lec13 CHO cells deficient in protein fucosylation (Ripka et al. Arch. Biochem. Biophys. 249:533-545 (1986); US Patent Application No. US 2003/0157108 A1, Presta, L; and WO 2004/056312 A1, Adams et al., especially at Example 11), and knockout cell lines, such as alpha-1,6-fucosyltransferase gene, FUT8, knockout CHO cells (see, e.g., Yamane-Ohnuki et al. Biotech. Bioeng. 87: 614 (2004); Kanda, Y. et al., Biotechnol. Bioeng., 94(4):680-688 (2006); and WO2003/085107).

### Effector Function Variants

[0302] In some embodiments, the present application contemplates an immunomodulatory molecule that possesses some but not all Fc effector functions, which makes it a desirable candidate for applications in which the half-life of the immunomodulatory molecule in vivo is important yet certain effector functions (such as CDC and ADCC) are unnecessary or deleterious. Some of the Fc domain variants have been discussed above. In vitro and/or in vivo cytotoxicity assays can be conducted to confirm the reduction/depletion of CDC and/or ADCC activities. For example, Fc receptor (FcR) binding assays can be conducted to ensure that the antibody lacks FcγR binding (hence likely lacking ADCC activity), but retains FcRn binding ability. The primary cells for mediating ADCC, NK cells, express FcγRIII only, whereas monocytes express FcγRI, FcγRII and FcγRIII. FcR expression on hematopoietic cells is summarized in Table 2 on page 464 of Ravetch and Kinet, Annu. Rev. Immunol. 9:457-492 (1991). Non-limiting examples of in vitro assays to assess ADCC activity of a molecule of interest is described in U.S. Pat. No. 5,500,362 (see, e.g. Hellstrom, I. et al. Proc. Nat'l Acad. Sci. USA 83:7059-7063 (1986)) and Hellstrom, I et al., Proc. Nat'l Acad. Sci. USA 82:1499-1502 (1985); 5,821,337 (see Bruggemann, M. et al., J. Erp. Med. 166:1351-1361 (1987)). Alternatively, non-radioactive assays methods may be employed (see, for example, ACTI™ non-radioactive cytotoxicity assay for flow cytometry (CellTechnology, Inc. Mountain View, CA; and CytoTox 96® non-radioactive cytotoxicity assay (Promega, Madison, WI). Useful effector cells for such assays include peripheral blood mononuclear cells (PBMC) and Natural Killer (NK) cells. Alternatively, or additionally, ADCC activity of the molecule of interest may be assessed in vivo, e.g., in an animal model such as that disclosed in Clynes et al. Proc. Nat'l Acad. Sci. USA 95:652-656 (1998). C1q binding assays may also be carried out to confirm that the antibody is unable to bind C1q and hence lacks CDC activity. See, e.g., C1q and C3c binding ELISA in WO 2006/029879 and WO 2005/100402. To assess complement activation, a CDC assay may be performed (see, for example, Gazzano-Santoro et al., J. Immunol. Methods 202:163 (1996); Cragg, M. S. et al., Blood 101:1045-1052 (2003); and Cragg, M. S. and M. J. Glennie, Blood 103:2738-2743 (2004)). FcRn binding and in vivo clearance/half-life determinations can also be performed using methods known in the art (see, e.g., Petkova, S. B. et al., Int'l. Immunol. 18(12):1759-1769 (2006)).

[0303] Fc domains with reduced effector function include those with substitution of one or more of Fc region residues 238, 265, 269, 270, 297, 327 and 329 (U.S. Pat. No. 6,737,056). Such Fc mutants include substitutions at two or more of amino acid positions 265, 269, 270, 297 and 327, including the so-called “DANA” Fc mutant with substitution of residues 265 and 297 to alanine (U.S. Pat. No. 7,332,581). Certain antibody variants with improved or diminished binding to FcRs are described (see, e.g., U.S. Pat. No. 6,737,056; WO 2004/056312, and Shields et al., J. Biol. Chem. 9(2): 6591-6604 (2001)). In some embodiments, alterations are made in the Fc domain that result in altered (i.e., either improved or diminished) C1q binding and/or CDC, e.g., as described in U.S. Pat. No. 6,194,551, WO 99/51642, and Idusogie et al. J. Immunol. 164: 4178-4184 (2000).

[0304] In some embodiments, the Fc domain comprises one or more amino acid substitutions, which increase half-life and/or improve binding to the neonatal Fc receptor (FcRn). Antibodies with increased half-lives and improved binding to the neonatal Fc receptor (FcRn), which is responsible for the transfer of maternal IgGs to the fetus (Guyer et al., J. Immunol. 117:587 (1976) and Kim et al., J. Immunol. 24:249 (1994)), are described in US2005/0014934A1 (Hinton et al.). Those antibodies comprise an Fc domain with one or more substitutions therein which improve binding of the Fc region to FcRn. Such Fc variants include those with substitutions at one or more of Fc region residues, e.g., substitution of Fc region residue 434 (U.S. Pat. No. 7,371,826).

[0305] See also Duncan & Winter, Nature 322:738-40 (1988); U.S. Pat. Nos. 5,648,260; 5,624,821; and WO 94/29351 concerning other examples of Fc domain variants.

### Cysteine Engineered Variants

[0306] In some embodiments, it may be desirable to create cysteine-engineered immunomodulatory molecules, e.g., “thioMAbs,” in which one or more residues of an immunomodulatory molecule are substituted with cysteine residues. In particular, embodiments, the substituted residues occur at accessible sites of the immunomodulatory molecule. By substituting those residues with cysteine, reactive thiol groups are thereby positioned at accessible sites of the immunomodulatory molecule and may be used to conjugate the immunomodulatory molecule to other moieties, such as drug moieties or linker-drug moieties, to create an immunomodulatory molecule-conjugate. In some embodiments, any one or more of the following residues may be substituted with cysteine: Al 18 (EU numbering) of the heavy chain; and S400 (EU numbering) of the heavy chain Fc domain. Cysteine engineered immunomodulatory molecules may be generated as described, e.g., in U.S. Pat. No. 7,521,541.

### Immunomodulatory Molecule Derivatives

[0307] In some embodiments, immunomodulatory molecules provided herein may further comprise an additional therapeutic compound, such as any therapeutic compounds known in the art. For example, the parental antibody in some embodiments can be an antibody drug conjugate (ADC). See, e.g., any ADC described in Shim H. (Biomolecules. 2020 March; 10(3): 360), and Diamantis N. and Banerji U. Br J Cancer. 2016; 114(4): 362-367, the contents of which are incorporated herein by reference in their entirety. In some embodiments, the therapeutic compound is conjugated to the Fc domain or portion thereof. In some embodiments, the therapeutic compound is a cytotoxic agent, a chemotherapeutic agent, a growth inhibitory agent, or an antibiotic.

[0308] In some embodiments, the immunomodulatory molecule further comprises a label selected from the group consisting of a chromophore, a fluorophore (e.g., coumarin, a xanthene, a cyanine, a pyrene, a borapolyazaindacene, an oxazine, and derivatives thereof), a fluorescent protein (e.g., GFP, phycobiliproteins, and derivatives thereof), a phosphorescent dye (e.g., dioxetanes, xanthene, or carbocyanine dyes, lanthanide chelates), a tandem dye (e.g., cyanine-phycobiliprotein derivative and xanthene-phycobiliprotein derivative), a particle (e.g., gold clusters, colloidal gold, microspheres, quantum dots), a hapten, an enzyme (e.g., peroxidase, a phosphatase, a glycosidase, a luciferase), and a radioisotope (e.g., ¹²⁵I, ³H, ¹⁴C, ³²P).

### III. Vectors Encoding Immunomodulatory Molecules

[0309] The present invention also provides isolated nucleic acids encoding any of the immunomodulatory molecules described herein (such as described in any of FIGS. 1A-1W and 11A-15D, Examples, and Sequence Listing herein, e.g., IL-2/anti-PD-1 agonist Ab immunomodulatory molecule, IL-12/anti-PD-1 agonist Ab immunomodulatory molecule, IL-2/PD-L1 immunomodulatory molecule, IL-12/PD-L1 immunomodulatory molecule, IL-2/PD-L2 immunomodulatory molecule, IL-12/PD-L2 immunomodulatory molecule), vectors comprising nucleic acids encoding any of the immunomodulatory molecules described herein. Also provided are isolated host cells (e.g., CHO cells, HEK 293 cells, Hela cells, COS cells) comprising nucleic acids encoding any of the immunomodulatory molecules described herein, or vectors comprising nucleic acids encoding any of the immunomodulatory molecules described herein.

[0310] In some embodiments, the vector comprising a nucleic acid encoding any of the immunomodulatory molecules described herein is suitable for replication and integration in eukaryotic cells, such as mammalian cells (e.g., CHO cells, HEK 293 cells, Hela cells, COS cells). In some embodiments, the vector is a viral vector. Examples of viral vectors include, but are not limited to, adenoviral vectors, adeno-associated virus vectors, lentiviral vector, retroviral vectors, herpes simplex viral vector, and derivatives thereof. Viral vector technology is well known in the art and is described, for example, in Sambrook et al. (2001, Molecular Cloning: A Laboratory Manual, Cold Spring Harbor Laboratory, New York), and in other virology and molecular biology manuals.

[0311] A number of viral based systems have been developed for gene transfer into mammalian cells. For example, retroviruses provide a convenient platform for gene delivery systems. The heterologous nucleic acid can be inserted into a vector and packaged in retroviral particles using techniques known in the art. The recombinant virus can then be isolated and delivered to the engineered mammalian cell in vitro or ex vivo. A number of retroviral systems are known in the art. In some embodiments, adenovirus vectors are used. A number of adenovirus vectors are known in the art. In some embodiments, lentivirus vectors are used. In some embodiments, self-inactivating lentiviral vectors are used. For example, self-inactivating lentiviral vectors carrying the immunomodulatory molecule coding sequence(s) can be packaged with protocols known in the art. The resulting lentiviral vectors can be used to transduce a mammalian cell using methods known in the art. Vectors derived from retroviruses such as lentivirus are suitable tools to achieve long-term gene transfer, because they allow long-term, stable integration of a transgene and its propagation in progeny cells. Lentiviral vectors also have low immunogenicity, and can transduce non-proliferating cells.

[0312] In some embodiments, the vector is a non-viral vector. In some embodiments, the vector is a transposon, such as a Sleeping Beauty (SB) transposon system, or a PiggyBac transposon system. In some embodiments, the vector is a polymer-based non-viral vector, including for example, poly (lactic-co-glycolic acid) (PLGA) and poly lactic acid (PLA), poly (ethylene imine) (PEI), and dendrimers. In some embodiments, the vector is a cationic-lipid based non-viral vector, such as cationic liposome, lipid nanoemulsion, and solid lipid nanoparticle (SLN). In some embodiments, the vector is a peptide-based gene non-viral vector, such as poly-L-lysine. Any of the known non-viral vectors suitable for genome editing can be used for introducing the immunomodulatory molecule-encoding nucleic acid(s) to the host cells. See, for example, Yin H. et al. Nature Rev. Genetics (2014) 15:521-555; Aronovich E L et al. “The Sleeping Beauty transposon system: a non-viral vector for gene therapy.” Hum. Mol. Genet. (2011) R1: R14-20; and Zhao S. et al. “PiggyBac transposon vectors: the tools of the human gene editing.” Transl. Lung Cancer Res. (2016) 5(1): 120-125, which are incorporated herein by reference. In some embodiments, any one or more of the nucleic acids or vectors encoding the immunomodulatory molecules described herein is introduced to the host cells (e.g., CHO, HEK 293, Hela, or COS) by a physical method, including, but not limited to electroporation, sonoporation, photoporation, magnetofection, hydroporation.

[0313] In some embodiments, the vector contains a selectable marker gene or a reporter gene to select cells expressing the immunomodulatory molecules described herein from the population of host cells transfected through vectors (e.g., lentiviral vectors). Both selectable markers and reporter genes may be flanked by appropriate regulatory sequences to enable expression in the host cells. For example, the vector may contain transcription and translation terminators, initiation sequences, and promoters useful for regulation of the expression of the nucleic acid sequences.

[0314] In some embodiments, the vector (e.g., viral vector) comprises any one of the nucleic acids encoding the immunomodulatory molecules described herein. The nucleic acid can be cloned into the vector using any known molecular cloning methods in the art, including, for example, using restriction endonuclease sites and one or more selectable markers. In some embodiments, the nucleic acid is operably linked to a promoter. Varieties of promoters have been explored for gene expression in mammalian cells, and any of the promoters known in the art may be used in the present invention. Promoters may be roughly categorized as constitutive promoters or regulated promoters, such as inducible promoters.

[0315] In some embodiments, the nucleic acid encoding the immunomodulatory molecules described herein is operably linked to a constitutive promoter. Constitutive promoters allow heterologous genes (also referred to as transgenes) to be expressed constitutively in the host cells. Exemplary promoters contemplated herein include, but are not limited to, cytomegalovirus immediate-early promoter (CMV), human elongation factors-1alpha (hEF1α), ubiquitin C promoter (UbiC), phosphoglycerokinase promoter (PGK), simian virus 40 early promoter (SV40), chicken β-Actin promoter coupled with CMV early enhancer (CAGG), a Rous Sarcoma Virus (RSV) promoter, a polyoma enhancer/herpes simplex thymidine kinase (MC1) promoter, a beta actin (β-ACT) promoter, a “myeloproliferative sarcoma virus enhancer, negative control region deleted, d1587rev primer-binding site substituted (MND)” promoter. The efficiencies of such constitutive promoters on driving transgene expression have been widely compared in a huge number of studies. In some embodiments, the nucleic acid encoding the immunomodulatory molecules described herein is operably linked to a CMV promoter.

[0316] In some embodiments, the nucleic acid encoding the immunomodulatory molecules described herein is operably linked to an inducible promoter. Inducible promoters belong to the category of regulated promoters. The inducible promoter can be induced by one or more conditions, such as a physical condition, microenvironment of the host cells, or the physiological state of the host cells, an inducer (i.e., an inducing agent), or a combination thereof. In some embodiments, the inducing condition does not induce the expression of endogenous genes in the host cell. In some embodiments, the inducing condition is selected from the group consisting of: inducer, irradiation (such as ionizing radiation, light), temperature (such as heat), redox state, and the activation state of the host cell. In some embodiments, the inducible promoter can be an NFAT promoter, a TETON® promoter, or an NFκB promoter. In some embodiments, the inducible promoter is a tet-inducible promoter.

[0317] In some embodiments, the vector comprises more than one nucleic acids encoding the immunomodulatory molecules described herein, e.g., different polypeptides of the immunomodulatory molecule. In some embodiments, each vector comprises 2 nucleic acids encoding 2 polypeptides of the immunomodulatory molecules described herein.

[0318] In some embodiments, the two or more nucleic acids encoding the immunomodulatory molecules described herein are operably regulated under the same promoter in the vector. In some embodiments, the two or more nucleic acids are linked in tandem via a linking sequence (e.g., IRES) or a nucleic acid sequence encoding a self-cleaving 2A peptide, such as P2A, T2A, E2A, F2A, BmCPV 2A, BmIFV 2A. In some embodiments, the nucleic acid encoding two or more polypeptides of the immunomodulatory molecules comprises linking sequence(s) (e.g., IRES) or nucleic acid sequence(s) encoding self-cleaving 2A peptide(s) (such as P2A, T2A, E2A, F2A, BmCPV 2A, BmIFV 2A) between the polypeptide encoding sequences. In some embodiments, the two or more nucleic acids encoding the immunomodulatory molecules described herein are operably regulated under separate promoters in the vector. In some embodiments, the promoters operably linked to each nucleic acid are different. In some embodiments, the promoters operably linked to each nucleic acid are the same. In some embodiments, the immunomodulatory molecule described herein is encoded by two or more vectors, e.g., each vector encodes one heavy chain (or one polypeptide comprising VH and cytokine moiety) and one pairing light chain, or each vector encodes one polypeptide of the immunomodulatory molecule.

### IV. Methods of Preparation

[0319] Also provided are methods of preparing any of the immunomodulatory molecules described herein (such as described in any of FIGS. 1A-1W and 11A-15D, Examples, and Sequence Listing herein, e.g., IL-2/anti-PD-1 agonist Ab immunomodulatory molecule, IL-12/anti-PD-1 agonist Ab immunomodulatory molecule, IL-2/PD-L1 immunomodulatory molecule, IL-12/PD-L1 immunomodulatory molecule, IL-2/PD-L2 immunomodulatory molecule, IL-12/PD-L2 immunomodulatory molecule). Thus, in some embodiments, there is provided a method of producing an immunomodulatory molecule, comprising: (a) culturing a host cell (e.g., CHO cell, HEK 293 cell, Hela cell, or COS cell) comprising any of the nucleic acids or vectors encoding the immunomodulatory molecules described herein under a condition effective to express the encoded immunomodulatory molecule; and (b) obtaining the expressed immunomodulatory molecule from said host cell. In some embodiments, the method of step (a) further comprises producing a host cell comprising the nucleic acid or vector encoding the immunomodulatory molecule described herein. The immunomodulatory molecule described herein may be prepared using any methods known in the art or as described herein. Also see Examples 1, 4, 5, 7, 9, 10, and 12 for exemplary methods. In some embodiments, the immunomodulatory molecules is expressed with eukaryotic cells, such as mammalian cells. In some embodiments, the immunomodulatory molecules is expressed with prokaryotic cells.

### 1. Recombinant Production in Prokaryotic Cells

### a) Vector Construction

[0320] Polynucleic acid sequences encoding the immunomodulatory molecules of the present application can be obtained using standard recombinant techniques. Desired polynucleic acid sequences may be isolated and sequenced from antibody or immunomodulatory molecule producing cells such as hybridoma cells. Alternatively, polynucleotides can be synthesized using nucleotide synthesizer or PCR techniques. Once obtained, sequences encoding the polypeptides are inserted into a recombinant vector capable of replicating and expressing heterologous polynucleotides in prokaryotic hosts. Many vectors that are available and known in the art can be used for the purpose of the present invention. Selection of an appropriate vector will depend mainly on the size of the nucleic acids to be inserted into the vector and the particular host cell to be transformed with the vector. Each vector contains various components, depending on its function (amplification or expression of heterologous polynucleotide, or both) and its compatibility with the particular host cell in which it resides. The vector components generally include, but are not limited to: an origin of replication, a selection marker gene, a promoter, a ribosome binding site (RBS), a signal sequence, the heterologous nucleic acid insert and a transcription termination sequence.

[0321] In general, plasmid vectors containing replicon and control sequences which are derived from species compatible with the host cell are used in connection with these hosts. The vector ordinarily carries a replication site, as well as marking sequences which are capable of providing phenotypic selection in transformed cells. For example, E. coli is typically transformed using pBR322, a plasmid derived from an E. coli species. pBR322 contains genes encoding ampicillin (Amp) and tetracycline (Tet) resistance and thus provides easy means for identifying transformed cells. pBR322, its derivatives, or other microbial plasmids or bacteriophage may also contain, or be modified to contain, promoters which can be used by the microbial organism for expression of endogenous proteins. Examples of pBR322 derivatives used for expression of particular antibodies are described in detail in Carter et al., U.S. Pat. No. 5,648,237.

[0322] In addition, phage vectors containing replicon and control sequences that are compatible with the host microorganism can be used as transforming vectors in connection with these hosts. For example, bacteriophage such as GEM™-11 may be utilized in making a recombinant vector, which can be used to transform susceptible host cells such as E. coli LE392.

[0323] The expression vector of the present application may comprise two or more promoter-cistron pairs, encoding each of the polypeptide components. A promoter is an untranslated regulatory sequence located upstream (5′) to a cistron that modulates its expression. Prokaryotic promoters typically fall into two classes, inducible and constitutive. Inducible promoter is a promoter that initiates increased levels of transcription of the cistron under its control in response to changes in the culture condition, e.g., the presence or absence of a nutrient or a change in temperature.

[0324] A large number of promoters recognized by a variety of potential host cells are well known. The selected promoter can be operably linked to cistron DNA encoding the polypeptide by removing the promoter from the source DNA via restriction enzyme digestion and inserting the isolated promoter sequence into the vector of the present application. Both the native promoter sequence and many heterologous promoters may be used to direct amplification and/or expression of the target genes. In some embodiments, heterologous promoters are utilized, as they generally permit greater transcription and higher yields of expressed target gene as compared to the native target polypeptide promoter.

[0325] Promoters suitable for use with prokaryotic hosts include the PhoA promoter, the—galactamase and lactose promoter systems, a tryptophan (trp) promoter system and hybrid promoters such as the tac or the trc promoter. However, other promoters that are functional in bacteria (such as other known bacterial or phage promoters) are suitable as well. Their nucleic acid sequences have been published, thereby enabling a skilled worker operably to ligate them to cistrons encoding the target light and heavy chains (Siebenlist et al. (1980) Cell 20: 269) using linkers or adaptors to supply any required restriction sites.

[0326] In some embodiments, each cistron within the recombinant vector comprises a secretion signal sequence component that directs translocation of the expressed polypeptides across a membrane. In general, the signal sequence may be a component of the vector, or it may be a part of the target polypeptide DNA that is inserted into the vector. The signal sequence selected for the purpose of this invention should be one that is recognized and processed (i.e., cleaved by a signal peptidase) by the host cell. For prokaryotic host cells that do not recognize and process the signal sequences native to the heterologous polypeptides, the signal sequence is substituted by a prokaryotic signal sequence selected, for example, from the group consisting of the alkaline phosphatase, penicillinase, Ipp, or heat-stable enterotoxin II (STH) leaders, LamB, PhoE, PelB, OmpA and MBP. In some embodiments of the present application, the signal sequences used in both cistrons of the expression system are STII signal sequences or variants thereof.

[0327] In some embodiments, the production of the immunomodulatory molecule according to the present application can occur in the cytoplasm of the host cell, and therefore does not require the presence of secretion signal sequences within each cistron. In some embodiments, polypeptide components are expressed, folded, and assembled to form an immunomodulatory molecule (or portion of the immunomodulatory molecule) within the cytoplasm. Certain host strains (e.g., the E. coli trxB⁻ strains) provide cytoplasm conditions that are favorable for disulfide bond formation, thereby permitting proper folding and assembly of expressed protein subunits. See Proba and Pluckthun, Gene, 159:203 (1995).

[0328] The present invention provides an expression system in which the quantitative ratio of expressed polypeptide components can be modulated in order to maximize the yield of secreted and properly assembled immunomodulatory molecules of the present application. Such modulation is accomplished at least in part by simultaneously modulating translational strengths for the polypeptide components. One technique for modulating translational strength is disclosed in Simmons et al., U.S. Pat. No. 5,840,523. It utilizes variants of the translational initiation region (TIR) within a cistron. For a given TIR, a series of amino acid or nucleic acid sequence variants can be created with a range of translational strengths, thereby providing a convenient means by which to adjust this factor for the desired expression level of the specific chain. TIR variants can be generated by conventional mutagenesis techniques that result in codon changes which can alter the amino acid sequence, although silent changes in the nucleic acid sequence are preferred. Alterations in the TIR can include, for example, alterations in the number or spacing of Shine-Dalgarno sequences, along with alterations in the signal sequence. One method for generating mutant signal sequences is the generation of a “codon bank” at the beginning of a coding sequence that does not change the amino acid sequence of the signal sequence (i.e., the changes are silent). This can be accomplished by changing the third nucleotide position of each codon; additionally, some amino acids, such as leucine, serine, and arginine, have multiple first and second positions that can add complexity in making the bank. This method of mutagenesis is described in detail in Yansura et al. (1992) METHODS: A Companion to Methods in Enzymol. 4:151-158.

[0329] Preferably, a set of vectors is generated with a range of TIR strengths for each cistron therein. This limited set provides a comparison of expression levels of each chain as well as the yield of the desired protein products under various TIR strength combinations. TIR strengths can be determined by quantifying the expression level of a reporter gene as described in detail in Simmons et al. U.S. Pat. No. 5,840,523. Based on the translational strength comparison, the desired individual TIRs are selected to be combined in the expression vector constructs of the present application.

### b) Prokaryotic Host Cells

[0330] Prokaryotic host cells suitable for expressing the immunomodulatory molecules of the present application include Archaebacteria and Eubacteria, such as Gram-negative or Gram-positive organisms. Examples of useful bacteria include Escherichia (e.g., E. coli), Bacilli (e.g., B. subtilis), Enterobacteria, Pseudomonas species (e.g., P. aeruginosa), Salmonella typhimurium, Serratia marcescans, Klebsiella, Proteus, Shigella, Rhizobia, Vitreoscilla, or Paracoccus. In some embodiments, gram-negative cells are used. In some embodiments, E. coli cells are used as hosts for the invention. Examples of E. coli strains include strain W3110 (Bachmann, Cellular and Molecular Biology, vol. 2 (Washington, D.C.: American Society for Microbiology, 1987), pp. 1190-1219; ATCC Deposit No. 27,325) and derivatives thereof, including strain 33D3 having genotype W3110 AfhuA (AtonA) ptr3 lac Iq lacL8 AompT A(nmpc-fepE) degP41 kan^{R}(U.S. Pat. No. 5,639,635). Other strains and derivatives thereof, such as E. coli 294 (ATCC 31,446), E. coli B, E. coli 1776 (ATCC 31,537) and E. coli RV308 (ATCC 31,608) are also suitable. These examples are illustrative rather than limiting. Methods for constructing derivatives of any of the above-mentioned bacteria having defined genotypes are known in the art and described in, for example, Bass et al., Proteins, 8:309-314 (1990). It is generally necessary to select the appropriate bacteria taking into consideration replicability of the replicon in the cells of a bacterium. For example, E. coli, Serratia, or Salmonella species can be suitably used as the host when well-known plasmids such as pBR322, pBR325, pACYC177, or pKN410 are used to supply the replicon.

[0331] Typically, the host cell should secrete minimal amounts of proteolytic enzymes, and additional protease inhibitors may desirably be incorporated in the cell culture.

### c) Protein Production

[0332] Host cells are transformed with the above-described expression vectors and cultured in conventional nutrient media modified as appropriate for inducing promoters, selecting transformants, or amplifying the genes encoding the desired sequences. Transformation means introducing DNA into the prokaryotic host so that the DNA is replicable, either as an extrachromosomal element or by chromosomal integrant. Depending on the host cell used, transformation is done using standard techniques appropriate to such cells. The calcium treatment employing calcium chloride is generally used for bacterial cells that contain substantial cell-wall barriers. Another method for transformation employs polyethylene glycol/DMSO. Yet another technique used is electroporation.

[0333] Host cells are transformed with the above-described expression vectors and cultured in conventional nutrient media modified as appropriate for inducing promoters, selecting transformants, or amplifying the genes encoding the desired sequences. Transformation means introducing DNA into the prokaryotic host so that the DNA is replicable, either as an extrachromosomal element or by chromosomal integrant. Depending on the host cell used, transformation is done using standard techniques appropriate to such cells. The calcium treatment employing calcium chloride is generally used for bacterial cells that contain substantial cell-wall barriers. Another method for transformation employs polyethylene glycol/DMSO. Yet another technique used is electroporation.

[0334] Prokaryotic cells used to produce the immunomodulatory molecules of the present application are grown in media known in the art and suitable for culture of the selected host cells. Examples of suitable media include luria broth (LB) plus necessary nutrient supplements. In some embodiments, the media also contains a selection agent, chosen based on the construction of the expression vector, to selectively permit growth of prokaryotic cells containing the expression vector. For example, ampicillin is added to media for growth of cells expressing ampicillin resistant gene.

[0335] Any necessary supplements besides carbon, nitrogen, and inorganic phosphate sources may also be included at appropriate concentrations introduced alone or as a mixture with another supplement or medium such as a complex nitrogen source. Optionally the culture medium may contain one or more reducing agents selected from the group consisting of glutathione, cysteine, cystamine, thioglycollate, dithioerythritol and dithiothreitol. The prokaryotic host cells are cultured at suitable temperatures. For E. coli growth, for example, the preferred temperature ranges from about 20° C. to about 39° C., more preferably from about 25° C. to about 37° C., even more preferably at about 30° C. The pH of the medium may be any pH ranging from about 5 to about 9, depending mainly on the host organism. For E. coli, the pH is preferably from about 6.8 to about 7.4, and more preferably about 7.0.

[0336] If an inducible promoter is used in the expression vector of the present application, protein expression is induced under conditions suitable for the activation of the promoter. In one aspect of the present application, PhoA promoters are used for controlling transcription of the polypeptides. Accordingly, the transformed host cells are cultured in a phosphate-limiting medium for induction. Preferably, the phosphate-limiting medium is the C.R.A.P medium (see, e.g., Simmons et al., J. Immunol. Methods (2002), 263:133-147). A variety of other inducers may be used, according to the vector construct employed, as is known in the art.

[0337] The expressed immunomodulatory molecules of the present application are secreted into and recovered from the periplasm of the host cells. Protein recovery typically involves disrupting the microorganism, generally by such means as osmotic shock, sonication or lysis. Once cells are disrupted, cell debris or whole cells may be removed by centrifugation or filtration. The proteins may be further purified, for example, by affinity resin chromatography. Alternatively, proteins can be transported into the culture media and isolated therein. Cells may be removed from the culture and the culture supernatant being filtered and concentrated for further purification of the proteins produced. The expressed polypeptides can be further isolated and identified using commonly known methods such as polyacrylamide gel electrophoresis (PAGE) and Western blot assay.

[0338] Alternatively, protein production is conducted in large quantity by a fermentation process. Various large-scale fed-batch fermentation procedures are available for production of recombinant proteins. Large-scale fermentations have at least 1000 liters of capacity, preferably about 1,000 to 100,000 liters of capacity. These fermentors use agitator impellers to distribute oxygen and nutrients, especially glucose (the preferred carbon/energy source). Small-scale fermentation refers generally to fermentation in a fermentor that is no more than approximately 100 liters in volumetric capacity, and can range from about 1 liter to about 100 liters.

[0339] During the fermentation process, induction of protein expression is typically initiated after the cells have been grown under suitable conditions to a desired density, e.g., an OD₅₅₀ of about 180-220, at which stage the cells are in the early stationary phase. A variety of inducers may be used, according to the vector construct employed, as is known in the art and described above. Cells may be grown for shorter periods prior to induction. Cells are usually induced for about 12-50 hours, although longer or shorter induction time may be used.

[0340] To improve the production yield and quality of the immunomodulatory molecules of the present application, various fermentation conditions can be modified. For example, to improve the proper assembly and folding of the secreted polypeptides, additional vectors overexpressing chaperone proteins, such as Dsb proteins (DsbA, DsbB, DsbC, DsbD, or DsbG) or FkpA (a peptidylprolyl cis, trans-isomerase with chaperone activity) can be used to co-transform the host prokaryotic cells. The chaperone proteins have been demonstrated to facilitate the proper folding and solubility of heterologous proteins produced in bacterial host cells. Chen et al. (1999) J Bio Chem 274:19601-19605; Georgiou et al., U.S. Pat. No. 6,083,715; Georgiou et al., U.S. Pat. No. 6,027,888; Bothmann and Pluckthun (2000) J. Biol. Chem. 275:17100-17105; Ramm and Pluckthun (2000) J. Biol. Chem. 275:17106-17113; Arie et al. (2001) Mol. Microbiol. 39:199-210.

[0341] To minimize proteolysis of expressed heterologous proteins (especially those that are proteolytically sensitive), certain host strains deficient for proteolytic enzymes can be used for the present invention. For example, host cell strains may be modified to effect genetic mutation(s) in the genes encoding known bacterial proteases such as Protease III, OmpT, DegP, Tsp, Protease I, Protease Mi, Protease V, Protease VI and combinations thereof. Some E. coli protease-deficient strains are available and described in, for example, Joly et al. (1998), supra; Georgiou et al., U.S. Pat. No. 5,264,365; Georgiou et al., U.S. Pat. No. 5,508,192; Hara et al., Microbial Drug Resistance, 2:63-72 (1996).

[0342] E. coli strains deficient for proteolytic enzymes and transformed with plasmids overexpressing one or more chaperone proteins may be used as host cells in the expression system encoding the immunomodulatory molecules of the present application.

### d) Protein Purification

[0343] The immunomodulatory molecules produced herein are further purified to obtain preparations that are substantially homogeneous for further assays and uses. Standard protein purification methods known in the art can be employed. The following procedures are exemplary of suitable purification procedures: fractionation on immunoaffinity or ion-exchange columns, ethanol precipitation, reverse phase HPLC, chromatography on silica or on a cation-exchange resin such as DEAE, chromatofocusing, SDS-PAGE, ammonium sulfate precipitation, and gel filtration using, for example, Sephadex G-75.

[0344] In some embodiments, Protein A immobilized on a solid phase is used for immunoaffinity purification of the immunomodulatory molecules comprising an Fc region of the present application. Protein A is a 42 kDa surface protein from Staphylococcus aureus which binds with a high affinity to Fc-containing constructs, e.g., antigen-binding fragment-hinge-Fc fusion proteins, antibodies, or immunomodulatory molecules described herein. Lindmark et al (1983) J. Immunol. Meth. 62:1-13. The solid phase to which Protein A is immobilized is preferably a column comprising a glass or silica surface, more preferably a controlled pore glass column or a silicic acid column. In some applications, the column has been coated with a reagent, such as glycerol, in an attempt to prevent nonspecific adherence of contaminants. The solid phase is then washed to remove contaminants non-specifically bound to the solid phase. Finally, the immunomodulatory molecules of interest are recovered from the solid phase by elution.

### 2. Recombinant Production in Eukaryotic Cells

[0345] For eukaryotic expression, the vector components generally include, but are not limited to, one or more of the following, a signal sequence, an origin of replication, one or more marker genes, and enhancer element, a promoter, and a transcription termination sequence.

### a) Signal Sequence Component

[0346] A vector for use in a eukaryotic host may also an insert that encodes a signal sequence or other polypeptide having a specific cleavage site at the N-terminus of the mature protein or polypeptide. The heterologous signal sequence selected preferably is one that is recognized and processed (i.e., cleaved by a signal peptidase) by the host cell. In mammalian cell expression, mammalian signal sequences as well as viral secretory leaders, for example, the herpes simplex gD signal, are available. The DNA for such precursor region is ligated in reading frame to DNA encoding the immunomodulatory molecules of the present application.

### b) Origin of Replication

[0347] Generally, the origin of replication component is not needed for mammalian expression vectors (the SV40 origin may typically be used only because it contains the early promoter).

### c) Selection Gene Component

[0348] Expression and cloning vectors may contain a selection gene, also termed a selectable marker. Typical selection genes encode proteins that (a) confer resistance to antibiotics or other toxins, e.g., ampicillin, neomycin, methotrexate, or tetracycline, (b) complement auxotrophic deficiencies, or (c) supply critical nutrients not available from complex media, e.g., the gene encoding D-alanine racemase for Bacilli.

[0349] One example of a selection scheme utilizes a drug to arrest growth of a host cell. Those cells that are successfully transformed with a heterologous gene produce a protein conferring drug resistance and thus survive the selection regimen. Examples of such dominant selection use the drugs neomycin, mycophenolic acid and hygromycin.

[0350] Another example of suitable selectable markers for mammalian cells are those that enable the identification of cells competent to take up nucleic acid encoding the immunomodulatory molecules of the present application, such as DHFR, thymidine kinase, metallothionein-I and —II, preferably primate metallothionein genes, adenosine deaminase, ornithine decarboxylase, etc.

[0351] For example, cells transformed with the DHFR selection gene are first identified by culturing all of the transformants in a culture medium that contains methotrexate (Mtx), a competitive antagonist of DHFR An appropriate host cell when wild-type DHFR is employed is the Chinese hamster ovary (CHO) cell line deficient in DHFR activity (e.g., ATCC CRL-9096).

[0352] Alternatively, host cells (particularly wild-type hosts that contain endogenous DHFR) transformed or co-transformed with the polypeptide encoding-DNA sequences, wild-type DHFR protein, and another selectable marker such as aminoglycoside 3′-phosphotransferase (APH) can be selected by cell growth in medium containing a selection agent for the selectable marker such as an aminoglycosidic antibiotic, e.g., kanamycin, neomycin, or G418. See U.S. Pat. No. 4,965,199.

### d) Promoter Component

[0353] Expression and cloning vectors usually contain a promoter that is recognized by the host organism and is operably linked to the nucleic acid encoding the desired polypeptide sequences. Virtually all eukaryotic genes have an AT-rich region located approximately 25 to 30 based upstream from the site where transcription is initiated. Another sequence found 70 to 80 bases upstream from the start of the transcription of many genes is a CNCAAT region where N may be any nucleotide. At the 3′ end of most eukaryotic is an AATAAA sequence that may be the signal for addition of the poly A tail to the 3′ end of the coding sequence. All of these sequences may be inserted into eukaryotic expression vectors. Also see “Promoters” subsection under “III. Vectors encoding immunomodulatory molecules” above.

[0354] Polypeptide transcription from vectors in mammalian host cells is controlled, for example, by promoters obtained from the genomes of viruses such as polyoma virus, fowlpox virus, adenovirus (such as Adenovirus 2), bovine papilloma virus, avian sarcoma virus, cytomegalovirus, a retrovirus, hepatitis-B virus and most preferably Simian Virus 40 (SV40), from heterologous mammalian promoters, e.g., the actin promoter or an immunoglobulin promoter, from heat-shock promoters, provided such promoters are compatible with the host cell systems.

[0355] The early and late promoters of the SV40 virus are conveniently obtained as an SV40 restriction fragment that also contains the SV40 viral origin of replication. The immediate early promoter of the human cytomegalovirus is conveniently obtained as a HindIII E restriction fragment. A system for expressing DNA in mammalian hosts using the bovine papilloma virus as a vector is disclosed in U.S. Pat. No. 4,419,446. A modification of this system is described in U.S. Pat. No. 4,601,978. See also Reyes et al., Nature 297:598-601 (1982) on expression of human-interferon cDNA in mouse cells under the control of a thymidine kinase promoter from herpes simplex virus. Alternatively, the Rous Sarcoma Virus long terminal repeat can be used as the promoter.

### e) Enhancer Element Component

[0356] Transcription of a DNA encoding the immunomodulatory molecules of the present application by higher eukaryotes is often increased by inserting an enhancer sequence into the vector. Many enhancer sequences are now known from mammalian genes (globin, elastase, albumin, α-fetoprotein, and insulin). Typically, however, one will use an enhancer from a eukaryotic cell virus. Examples include the SV40 enhancer on the late side of the replication origin (100-270 bp), the cytomegalovirus early promoter enhancer, the polyoma enhancer on the late side of the replication origin, and adenovirus enhancers. See also Yaniv, Nature 297:17-18 (1982) on enhancing elements for activation of eukaryotic promoters. The enhancer may be spliced into the vector at a position 5′ or 3′ to the polypeptide encoding sequence, but is preferably located at a site 5′ from the promoter.

### f) Transcription Termination Component

[0357] Expression vectors used in eukaryotic host cells (yeast, fungi, insect, plant, animal, human, or nucleated cells from other multicellular organisms) will also contain sequences necessary for the termination of transcription and for stabilizing the mRNA. Such sequences are commonly available from the 5′ and, occasionally 3′, untranslated regions of eukaryotic or viral DNAs or cDNAs. These regions contain nucleotide segments transcribed as polyadenylated fragments in the untranslated portion of the polypeptide-encoding mRNA. One useful transcription termination component is the bovine growth hormone polyadenylation region. See WO94/11026 and the expression vector disclosed therein.

### g) Selection and Transformation of Host Cells

[0358] Suitable host cells for cloning or expressing the DNA in the vectors herein include higher eukaryote cells described herein, including vertebrate host cells. Propagation of vertebrate cells in culture (tissue culture) has become a routine procedure. Examples of useful mammalian host cell lines are monkey kidney CV1 line transformed by SV40 (COS-7, ATCC CRL 1651); human embryonic kidney line (293 or 293 cells subcloned for growth in suspension culture, Graham et al., J. Gen Virol. 36:59 (1977)); baby hamster kidney cells (BHK, ATCC CCL 10); Chinese hamster ovary cells/-DHFR (CHO, Urlaub et al., Proc. Natl. Acad. Sci. USA 77:4216 (1980)); mouse sertoli cells (TM4, Mather, Biol. Reprod. 23:243-251 (1980)); monkey kidney cells (CV1 ATCC CCL 70); African green monkey kidney cells (VERO-76, ATCC CRL-1587); human cervical carcinoma cells (HELA, ATCC CCL 2); canine kidney cells (MDCK, ATCC CCL 34); buffalo rat liver cells (BRL 3A, ATCC CRL 1442); human lung cells (W138, ATCC CCL 75); human liver cells (Hep G2, HB 8065); mouse mammary tumor (MMT 060562, ATCC CCL51); TR1 cells (Mather et al., Annals N.Y. Acad. Sci. 383:44-68 (1982)); MRC 5 cells; FS4 cells; and a human hepatoma line (Hep G2).

[0359] Host cells are transformed with the above-described expression or cloning vectors for immunomodulatory molecule production and cultured in conventional nutrient media modified as appropriate for inducing promoters, selecting transformants, or amplifying the genes encoding the desired sequences.

### h) Culturing the Host Cells

[0360] The host cells used to produce the immunomodulatory molecules of the present application may be cultured in a variety of media. Commercially available media such as Ham's F10 (Sigma), Minimal Essential Medium ((MEM), (Sigma), RPMI-1640 (Sigma), and Dulbecco's Modified Eagle's Medium ((DMEM), Sigma) are suitable for culturing the host cells. In addition, any of the media described in Ham et al., Meth. Enz. 58:44 (1979), Barnes et al., Anal. Biochem. 102:255 (1980), U.S. Pat. Nos. 4,767,704; 4,657,866; 4,927,762; 4,560,655; or 5,122,469; WO 90/03430; WO 87/00195; or U.S. Pat. Re. 30,985 may be used as culture media for the host cells. Any of these media may be supplemented as necessary with hormones and/or other growth factors (such as insulin, transferrin, or epidermal growth factor), salts (such as sodium chloride, calcium, magnesium, and phosphate), buffers (such as HEPES), nucleotides (such as adenosine and thymidine), antibiotics (such as GENTAMYCIN™ drug), trace elements (defined as inorganic compounds usually present at final concentrations in the micromolar range), and glucose or an equivalent energy source. Any other necessary supplements may also be included at appropriate concentrations that would be known to those skilled in the art. The culture conditions, such as temperature, pH, and the like, are those previously used with the host cell selected for expression, and will be apparent to the ordinarily skilled artisan.

### i) Protein Purification

[0361] When using recombinant techniques, the immunomodulatory molecule can be produced intracellularly, in the periplasmic space, or directly secreted into the medium. If the immunomodulatory molecule is produced intracellularly, as a first step, the particulate debris, either host cells or lysed fragments, are removed, for example, by centrifugation or ultrafiltration. Carter et al., Bio/Technology 10:163-167 (1992) describe a procedure for isolating antibodies which are secreted to the periplasmic space of E. coli. Briefly, cell paste is thawed in the presence of sodium acetate (pH 3.5), EDTA, and phenylmethylsulfonylfluoride (PMSF) over about 30 min. Cell debris can be removed by centrifugation. Where the immunomodulatory molecule is secreted into the medium, supernatants from such expression systems are generally first concentrated using a commercially available protein concentration filter, for example, an Amicon or Millipore Pellicon ultrafiltration unit. A protease inhibitor such as PMSF may be included in any of the foregoing steps to inhibit proteolysis and antibiotics may be included to prevent the growth of adventitious contaminants.

[0362] The protein composition prepared from the cells can be purified using, for example, hydroxylapatite chromatography, gel electrophoresis, dialysis, and affinity chromatography, with affinity chromatography being the preferred purification technique. The suitability of protein A as an affinity ligand depends on the species and isotype of any immunoglobulin Fc domain that is present in the immunomodulatory molecule. Protein A can be used to purify the immunomodulatory molecules, antigen-binding fragment-Fc fusion proteins, or antibodies that are based on human immunoglobulins containing 1, 2, or 4 heavy chains (Lindmark et al., J. Immunol. Meth. 62:1-13 (1983)). Protein G is recommended for all mouse isotypes and for human 3 (Guss et al., EMBO J. 5:15671575 (1986)). The matrix to which the affinity ligand is attached is most often agarose, but other matrices are available. Mechanically stable matrices such as controlled pore glass or poly(styrene-divinyl) benzene allow for faster flow rates and shorter processing times than can be achieved with agarose. Where the immunomodulatory molecule comprises a C_{H}3 domain, the Bakerbond ABXTMresin (J. T. Baker, Phillipsburg, N.J.) is useful for purification. Other techniques for protein purification such as fractionation on an ion-exchange column, ethanol precipitation, Reverse Phase HPLC, chromatography on silica, chromatography on heparin SEPHAROSE™ chromatography on an anion or cation exchange resin (such as a polyaspartic acid column), chromatofocusing, SDS-PAGE, and ammonium sulfate precipitation are also available depending on the immunomodulatory molecule to be recovered.

[0363] Following any preliminary purification step(s), the mixture comprising the immunomodulatory molecule of interest and contaminants may be subjected to low pH hydrophobic interaction chromatography using an elution buffer at a pH between about 2.54.5, preferably performed at low salt concentrations (e.g., from about 0-0.25M salt).

### V. Pharmaceutical Compositions

[0364] Further provided are pharmaceutical compositions comprising any of the immunomodulatory molecules described herein (such as described in any of FIGS. 1A-1W and 11A-15D, Examples, and Sequence Listing herein, e.g., IL-2/anti-PD-1 agonist Ab immunomodulatory molecule, IL-12/anti-PD-1 agonist Ab immunomodulatory molecule, IL-2/PD-L1 immunomodulatory molecule, IL-12/PD-L1 immunomodulatory molecule, IL-2/PD-L2 immunomodulatory molecule, IL-12/PD-L2 immunomodulatory molecule), and optionally a pharmaceutically acceptable carrier. Pharmaceutical compositions can be prepared by mixing an immunomodulatory molecule described herein having the desired degree of purity with optional pharmaceutically acceptable carriers, excipients or stabilizers (Remington's Pharmaceutical Sciences 16th edition, Osol, A. Ed. (1980)), in the form of lyophilized formulations or aqueous solutions.

[0365] A reconstituted formulation can be prepared by dissolving a lyophilized immunomodulatory molecule described herein in a diluent such that the protein is dispersed throughout. Exemplary pharmaceutically acceptable (safe and non-toxic for administration to a human) diluents suitable for use in the present application include, but are not limited to, sterile water, bacteriostatic water for injection (BWFI), a pH buffered solution (e.g., phosphate-buffered saline), sterile saline solution, Ringer's solution or dextrose solution, or aqueous solutions of salts and/or buffers.

[0366] In some embodiments, the pharmaceutical composition comprises a homogeneous population of immunomodulatory molecules described herein. A homogeneous population means the immunomodulatory molecules are exactly the same to each other, e.g., same immunomodulatory molecule configuration, same first binding domain (e.g., cytokine moiety), same second binding domain (e.g., ligand, receptor, VHH, scFv, or Fab), same linker if any, same hinge region, and same Fc domain. In some embodiments, at least about 70% (such as at least about any of 75%, 80%, 85%, 90%, 95%, 96%, 97%, 98%, or 99%) of the immunomodulatory molecules in the pharmaceutical composition are homogeneous.

[0367] The pharmaceutical composition is preferably to be stable, in which the immunomodulatory molecule here essentially retains its physical and chemical stability and integrity upon storage. Various analytical techniques for measuring protein stability are available in the art and are reviewed in Peptide and Protein Drug Delivery, 247-301, Vincent Lee Ed., Marcel Dekker, Inc., New York, N.Y., Pubs. (1991) and Jones, A. Adv. Drug Delivery Rev. 10: 29-90 (1993). Stability can be measured at a selected temperature for a selected time period. For rapid screening, the formulation may be kept at 40° C. for 2 weeks to 1 month, at which time stability is measured. Where the formulation is to be stored at 2-8° C., generally the formulation should be stable at 30° C. or 40° C. for at least 1 month, and/or stable at 2-8° C. for at least 2 years. Where the formulation is to be stored at 30° C., generally the formulation should be stable for at least 2 years at 30° C., and/or stable at 40° C. for at least 6 months. For example, the extent of aggregation during storage can be used as an indicator of protein stability. In some embodiments, the stable formulation of immunomodulatory molecules described herein may comprise less than about 10% (preferably less than about 5%) of the immunomodulatory molecules present as an aggregate in the formulation.

[0368] Acceptable carriers, excipients, or stabilizers are nontoxic to recipients at the dosages and concentrations employed, and include buffers, antioxidants including ascorbic acid, methionine, Vitamin E, sodium metabisulfite; preservatives, isotonicifiers (e.g., sodium chloride), stabilizers, metal complexes (e.g., Zn-protein complexes); chelating agents such as EDTA and/or non-ionic surfactants.

[0369] Examples of physiologically acceptable carriers include buffers such as phosphate, citrate, and other organic acids; antioxidants including ascorbic acid and methionine; preservatives (such as octadecyldimethylbenzyl ammonium chloride; hexamethonium chloride; benzalkonium chloride, benzethonium chloride; phenol, butyl or benzyl alcohol; alkyl parabens such as methyl or propyl paraben; catechol; resorcinol; cyclohexanol; 3-pentanol; and m-cresol); low molecular weight (less than about 10 residues) polypeptide; proteins, such as serum albumin, gelatin, or immunoglobulins; hydrophilic polymers such as polyvinylpyrrolidone; amino acids such as glycine, glutamine, asparagine, arginine or lysine; monosaccharides, disaccharides, and other carbohydrates including glucose, mannose, or dextrins; chelating agents such as EDTA; sugars such as sucrose, mannitol, trehalose or sorbitol; salt-forming counterions such as sodium; metal complexes (e.g. Zn-protein complexes); and/or nonionic surfactants such as TWEEN™, polyethylene glycol (PEG), and PLURONICS™ or polyethylene glycol (PEG).

[0370] Buffers are used to control the pH in a range which optimizes the therapeutic effectiveness, especially if stability is pH dependent. Buffers are preferably present at concentrations ranging from about 50 mM to about 250 mM. Suitable buffering agents for use in the present application include both organic and inorganic acids and salts thereof. For example, citrate, phosphate, succinate, tartrate, fumarate, gluconate, oxalate, lactate, acetate. Additionally, buffers may comprise histidine and trimethylamine salts such as Tris.

[0371] Preservatives are added to retard microbial growth, and are typically present in a range from 0.2%-1.00% (w/v). The addition of a preservative may, for example, facilitate the production of a multi-use (multiple dose) formulation. Suitable preservatives for use in the present application include octadecyldimethylbenzyl ammonium chloride; hexamethonium chloride; benzalkonium halides (e.g., chloride, bromide, iodide), benzethonium chloride; thimerosal, phenol, butyl or benzyl alcohol; alkyl parabens such as methyl or propyl paraben; catechol; resorcinol; cyclohexanol, 3-pentanol, and m-cresol.

[0372] Tonicity agents, sometimes known as “stabilizers” are present to adjust or maintain the tonicity of liquid in a composition. When used with large, charged biomolecules such as proteins and antibodies, they are often termed “stabilizers” because they can interact with the charged groups of the amino acid side chains, thereby lessening the potential for inter and intra-molecular interactions. Tonicity agents can be present in any amount between 0.1% to 25% by weight, preferably 1% to 5%, taking into account the relative amounts of the other ingredients. Preferred tonicity agents include polyhydric sugar alcohols, preferably trihydric or higher sugar alcohols, such as glycerin, erythritol, arabitol, xylitol, sorbitol and mannitol.

[0373] Additional excipients include agents which can serve as one or more of the following: (1) bulking agents, (2) solubility enhancers, (3) stabilizers and (4) and agents preventing denaturation or adherence to the container wall. Such excipients include: polyhydric sugar alcohols (enumerated above); amino acids such as alanine, glycine, glutamine, asparagine, histidine, arginine, lysine, ornithine, leucine, 2-phenylalanine, glutamic acid, threonine, etc.; organic sugars or sugar alcohols such as sucrose, lactose, lactitol, trehalose, stachyose, mannose, sorbose, xylose, ribose, ribitol, myoinisitose, myoinisitol, galactose, galactitol, glycerol, cyclitols (e.g., inositol), polyethylene glycol; sulfur containing reducing agents, such as urea, glutathione, thioctic acid, sodium thioglycolate, thioglycerol, α-monothioglycerol and sodium thio sulfate; low molecular weight proteins such as human serum albumin, bovine serum albumin, gelatin or other immunoglobulins; hydrophilic polymers such as polyvinylpyrrolidone; monosaccharides (e.g., xylose, mannose, fructose, glucose; disaccharides (e.g., lactose, maltose, sucrose); trisaccharides such as raffinose; and polysaccharides such as dextrin or dextran.

[0374] Non-ionic surfactants or detergents (also known as “wetting agents”) are present to help solubilize the immunomodulatory molecules as well as to protect the immunomodulatory molecules against agitation-induced aggregation, which also permits the formulation to be exposed to shear surface stress without causing denaturation of the active immunomodulatory molecules. Non-ionic surfactants are present in a range of about 0.05 mg/ml to about 1.0 mg/ml, preferably about 0.07 mg/ml to about 0.2 mg/ml.

[0375] Suitable non-ionic surfactants include polysorbates (20, 40, 60, 65, 80, etc.), polyoxamers (184, 188, etc.), PLURONIC® polyols, TRITON®, polyoxyethylene sorbitan monoethers (TWEEN®-20, TWEEN®-80, etc.), lauromacrogol 400, polyoxyl 40 stearate, polyoxyethylene hydrogenated castor oil 10, 50 and 60, glycerol monostearate, sucrose fatty acid ester, methyl cellulose and carboxymethyl cellulose. Anionic detergents that can be used include sodium lauryl sulfate, dioctyle sodium sulfosuccinate and dioctyl sodium sulfonate. Cationic detergents include benzalkonium chloride or benzethonium chloride.

[0376] In order for the pharmaceutical compositions to be used for in vivo administration, they must be sterile. The pharmaceutical composition may be rendered sterile by filtration through sterile filtration membranes. The pharmaceutical compositions herein generally are placed into a container having a sterile access port, for example, an intravenous solution bag or vial having a stopper pierceable by a hypodermic injection needle.

[0377] Sustained-release preparations may be prepared. Suitable examples of sustained-release preparations include semi-permeable matrices of solid hydrophobic polymers containing the antagonist, which matrices are in the form of shaped articles, e.g., films, or microcapsules. Examples of sustained-release matrices include polyesters, hydrogels (for example, poly(2-hydroxyethyl-methacrylate), or poly(vinylalcohol)), polylactides (U.S. Pat. No. 3,773,919), copolymers of L-glutamic acid and ethyl-L-glutamate, non-degradable ethylene-vinyl acetate, degradable lactic acid-glycolic acid copolymers such as the LUPRON DEPOT™ (injectable microspheres composed of lactic acid-glycolic acid copolymer and leuprolide acetate), and poly-D-(−)-3-hydroxybutyric acid.

[0378] The pharmaceutical compositions herein may also contain more than one active compound as necessary for the particular indication being treated, preferably those with complementary activities that do not adversely affect each other. Alternatively, or in addition, the composition may comprise a cytotoxic agent, chemotherapeutic agent, cytokine, immunosuppressive agent, or growth inhibitory agent. Such molecules are suitably present in combination in amounts that are effective for the purpose intended.

[0379] The active ingredients may also be entrapped in microcapsules prepared, for example, by coacervation techniques or by interfacial polymerization, for example, hydroxymethylcellulose or gelatin-microcapsules and poly-(methylmethacylate) microcapsules, respectively, in colloidal drug delivery systems (for example, liposomes, albumin microspheres, microemulsions, nanoparticles and nanocapsules) or in macroemulsions. Such techniques are disclosed in Remington's Pharmaceutical Sciences 18th edition.

[0380] In some embodiments, the pharmaceutical composition is contained in a single-use vial, such as a single-use sealed vial. In some embodiments, the pharmaceutical composition is contained in a multi-use vial. In some embodiments, the pharmaceutical composition is contained in bulk in a container. In some embodiments, the pharmaceutical composition is cryopreserved.

### VI. Methods of Treating Diseases or Directing Cytokine Activity

[0381] The immunomodulatory molecules described herein (such as described in any of FIGS. 1A-1W and 11A-15D, Examples, and Sequence Listing herein, e.g., IL-2/anti-PD-1 agonist Ab immunomodulatory molecule, IL-12/anti-PD-1 agonist Ab immunomodulatory molecule, IL-2/PD-L1 immunomodulatory molecule, IL-12/PD-L1 immunomodulatory molecule, IL-2/PD-L2 immunomodulatory molecule, IL-12/PD-L2 immunomodulatory molecule) and compositions (e.g., pharmaceutical compositions) thereof are useful for a variety of applications, such as in diagnosis, molecular assays, and therapy. In some embodiments, there is provided a method of treating a disease (e.g., cancer (e.g., PD-L1+ and/or PD-L2+cancer), infection such as viral infection, autoimmune disease, allergy, graft rejection, or GvHD) in an individual (e.g., human), comprising administering to the individual an effective amount of any of the immunomodulatory molecules described herein or pharmaceutical compositions thereof. In some embodiments, there is also provided a method of modulating an immune response in an individual (e.g., human), comprising administering to the individual an effective amount of any of the immunomodulatory molecules described herein or pharmaceutical compositions thereof. In some embodiments, the activity of the first binding domain (e.g., cytokine or variant thereof) is selectively activated upon binding of the immunomodulatory molecule to the second target molecule, when the first binding domain is positioned at the hinge region between the second binding domain and an Fc domain or portion thereof. In some embodiments, the immunomodulatory molecule or pharmaceutical composition thereof is administered intravenously, subcutaneously, or intratumorally. In some embodiments, the immunomodulatory molecule or pharmaceutical composition thereof is administered in an amount of about 1 μg/kg to about 10 mg/kg. In some embodiments, the immunomodulatory molecule or pharmaceutical composition thereof is administered once every three weeks. In some embodiments, the cancer is selected from the group consisting of lung cancer, liver cancer, renal cancer, colorectal cancer, ovarian cancer, breast cancer, pancreatic cancer, gastric carcinoma, bile duct cancer, squamous cell carcinoma, bladder cancer, esophageal cancer, mesothelioma, melanoma, head and neck cancer, thyroid cancer, sarcoma, prostate cancer, glioblastoma, cervical cancer, thymic carcinoma, leukemia, lymphoma, myeloma, mycoses fungoides, and merkel cell cancer.

[0382] In some embodiments, the method of treating cancer has one or more of the following biological activities: (1) killing cancer cells; (2) inhibiting proliferation of cancer cells; (3) inducing immune response in a tumor (e.g., inducing infiltration of immune effector cells to tumor site, inducing immune cell proliferation, differentiation and/or activation, and/or inducing pro-inflammatory cytokine secretion by immune cells); (4) reducing tumor size; (5) alleviating one or more symptoms in an individual having cancer; (6) inhibiting tumor metastasis; (7) prolonging survival; (8) prolonging time to cancer progression; and (9) preventing, inhibiting, or reducing the likelihood of the recurrence of a cancer. In some embodiments, the method of killing cancer cells mediated by the immunomodulatory molecule or pharmaceutical composition described herein can achieve a tumor cell death rate of at least about any of 10%, 20%, 30%, 40%, 50%, 60%, 70%, 80%, 90%, 95%, or more. In some embodiments, the method of reducing tumor size mediated by the immunomodulatory molecule or pharmaceutical composition described herein can reduce at least about 10% (including for example at least about any of 20%, 30%, 40%, 60%, 70%, 80%, 90%, or 100%) of the tumor size. In some embodiments, the method of inhibiting tumor metastasis mediated by the immunomodulatory molecule or pharmaceutical composition described herein can inhibit at least about 10% (including for example at least about any of 20%, 30%, 40%, 60%, 700%6, 80%, 90%, or 100%) of the metastasis. In some embodiments, the method of prolonging survival of an individual (e.g., human) mediated by the immunomodulatory molecule or pharmaceutical composition described herein can prolongs the survival of the individual by at least any of 1, 2, 3, 4, 5, 6, 7, 8, 9, 10, 11, 12, 18, or 24 months. In some embodiments, the method of prolonging time to cancer progression mediated by the immunomodulatory molecule or pharmaceutical composition described herein can prolong the time to cancer progression by at least any of 1, 2, 3, 4, 5, 6, 7, 8, 9, 10, 11, or 12 weeks. In some embodiments, the method of inducing immune response to a tumor can increase, enhance, or stimulate an immune response or function in a subject. In some embodiments, the immune response or function is increased, enhanced, and/or stimulated by activating effector cells (e.g., T cells, e.g., CD8+ and/or CD4+ T cells), expanding (increasing) an effector cell population, and/or killing target cells (e.g., target tumor cells) in the subject. In some embodiments, the CD4 and/or CD8 T cells in the individual have increased or enhanced priming, activation, proliferation, cytokine release and/or cytolytic activity relative to prior to the administration of the immunomodulatory molecule or pharmaceutical composition described herein.

[0383] The methods described herein are suitable for treating a variety of cancers, including both solid cancer and liquid cancer. The methods are applicable to cancers of all stages, including early stage cancer, non-metastatic cancer, primary cancer, advanced cancer, locally advanced cancer, metastatic cancer, or cancer in remission. The methods described herein may be used as a first therapy, second therapy, third therapy, or combination therapy with other types of cancer therapies known in the art, such as surgery, radiation, chemotherapy, immunotherapy, hormone therapy, or a combination thereof. In some embodiments, the method is used to treat an individual who has previously been treated. In some embodiments, the cancer has been refractory to prior therapy. In some embodiments, the method is used to treat an individual who has not previously been treated. In some embodiments, the cancer is partially resistant to immune checkpoint inhibitor monotherapy (e.g., partially resistant to anti-PD-1 or anti-PD-L1 antibody monotherapy treatment).

[0384] In some embodiments, the cancer is a PD-L1 expressing cancer. In some embodiments, the method is suitable for treating cancers with aberrant PD-1 or PD-L1/PD-L2 expression (e.g., HER2+cancer), activity and/or signaling include, by way of non-limiting example, hematological cancer and/or solid tumors. Some cancers whose growth may be inhibited using the immunomodulatory molecules of the invention include cancers typically responsive to immunotherapy. Non-limiting examples of other cancers for treatment include melanoma (e.g., metastatic malignant melanoma), renal cancer (e.g., clear cell carcinoma), prostate cancer (e.g., hormone refractory prostate adenocarcinoma), breast cancer, colon cancer and lung cancer (e.g., non-small cell lung cancer). Additionally, the invention includes refractory or recurrent malignancies whose growth may be inhibited using the immunomodulatory molecules of the invention. The present invention is also useful for treatment of metastatic cancers, especially metastatic cancers that express PD-L1 (Iwai et al. (2005) Int. Immunol. 17:133-144). In some embodiments, the cancer with aberrant PD-1 or PD-L1/PD-L2 expression, activity and/or signaling is partially resistant to PD-1 or PD-L1 blockade (e.g., partially resistant to anti-PD-1 antibody or anti-PD-L1 antibody treatment).

[0385] In some embodiments, the methods described herein are suitable for treating a solid cancer selected from the group consisting of colon cancer, rectal cancer, renal-cell carcinoma, liver cancer, non-small cell carcinoma of the lung, cancer of the small intestine, cancer of the esophagus, melanoma, bone cancer, pancreatic cancer, skin cancer, cancer of the head or neck, cutaneous or intraocular malignant melanoma, uterine cancer, ovarian cancer, rectal cancer, cancer of the anal region, stomach cancer, testicular cancer, uterine cancer, carcinoma of the fallopian tubes, carcinoma of the endometrium, carcinoma of the cervix, carcinoma of the vagina, carcinoma of the vulva, Hodgkin's Disease, non-Hodgkin's lymphoma (NHL), cutaneous T-cell lymphoma (CTCL), cancer of the endocrine system, cancer of the thyroid gland, cancer of the parathyroid gland, cancer of the adrenal gland, sarcoma of soft tissue, cancer of the urethra, cancer of the penis, solid tumors of childhood, cancer of the bladder, cancer of the kidney or ureter, carcinoma of the renal pelvis, neoplasm of the central nervous system (CNS), primary CNS lymphoma, tumor angiogenesis, spinal axis tumor, brain stem glioma, pituitary adenoma, Kaposi's sarcoma, epidermoid cancer, squamous cell cancer, T-cell lymphoma, environmentally induced cancers, combinations of said cancers, and metastatic lesions of said cancers.

[0386] In some embodiments, the methods described herein are suitable for treating a hematologic cancer chosen from one or more of acute myeloid leukemia (AML), chronic lymphocytic leukemia (CLL), acute leukemias, acute lymphoid leukemia (ALL), B-cell acute lymphoid leukemia (B-ALL), T-cell acute lymphoid leukemia (T-ALL), chronic myelogenous leukemia (CML), B cell prolymphocytic leukemia, blastic plasmacytoid dendritic cell neoplasm, Burkitt's lymphoma, diffuse large B cell lymphoma, follicular lymphoma, hairy cell leukemia, small cell- or a large cell-follicular lymphoma, malignant lymphoproliferative conditions, MALT lymphoma, mantle cell lymphoma, marginal zone lymphoma, multiple myeloma, myelodysplasia and myelodysplastic syndrome, non-Hodgkin's lymphoma, Hodgkin's lymphoma, plasmablastic lymphoma, plasmacytoid dendritic cell neoplasm, Waldenstrom macroglobulinemia, or pre-leukemia.

[0387] In some embodiments, the methods described herein are for treating infection, e.g., fungal, viral, bacterial, protozoal, or other parasitic infection. In some embodiments, the method of treating infection described herein prevent worsening of, arrest and/or ameliorate at least one symptom of a pathogen infection in an individual in need thereof, reduce or eliminate pathogen, prevent damage to said individual or an organ or tissue of said individual, and/or prevent death. In some embodiments, the methods described herein can achieve one or more of the following: (a) controlling, ameliorating, and/or preventing tissue and/or organ injury or failure, such as induced by virus infection; (b) controlling, reducing, and/or inhibiting cell necrosis (such as reducing at least about 10% (including for example at least about any of 20%, 30%, 40%, 60%, 70%, 80%, 90%, or 100%) cell necrosis), such as necrosis in infected and/or non-infected tissue and/or organ; (c) controlling, and/or increasing the infiltration of inflammatory cells (e.g., NK cells, cytotoxic T cells, neutrophils) in infected tissues and/or organs, such as increasing at least about 10% (including for example at least about any of 20%, 30%, 40%, 60%, 70%, 80%, 90%, or 100%) inflammatory cell infiltration; (d) controlling, ameliorating and/or preventing inflammation in non-infected tissue and/or organ, systemic inflammation, and/or cytokine storm, such as downregulating at least about 10% (including for example at least about any of 20%, 30%, 40%, 60%, 70%, 80%, 90%, or 100%); (e) reducing mortality rate associated with pathogen infection, and/or preventing death, such as reducing at least about 10% (including for example at least about any of 20%, 30%, 40%, 60%, 70%, 80%, 90%, or 100%) death rate; and (f) reducing or eliminating at least about 10% (including for example at least about any of 20%, 30%, 40%, 60%, 70%, 80%, 90%, or 100%) pathogen.

[0388] In some embodiments, the methods described herein are for treating an immune disease, such as an autoimmune disease, or an immune suppression.

[0389] In some embodiments, the methods described herein are for treating immune suppression. Immunosuppression is a reduction or entirely absent of the activation or efficacy of the immune system, resulting in immune system's inability to fight diseases, for example infectious diseases or cancer. Immunosuppression can either be the result of diseases, or be produced by pharmaceuticals or an infection, resulting in an increased susceptibility to secondary infections by pathogens such as bacteria and viruses. Many diseases are characterized by the development of progressive immunosuppression in the patient. The presence of an impaired immune response in patients with malignancies (e.g. leukemia, lymphoma, multiple myeloma) is well documented. Progressive immunosuppression has also been observed in certain chronic infection such as AIDS, sepsis, leprosy, cytomegalovirus infections, malaria, lupus, and the like. Immunodeficiency is also a potential adverse effect of many therapeutic treatments (radiotherapy or chemotherapy for example). By means of example and not limitation, diseases and conditions associated with immunodeficiency or immunosuppression comprise: human immunodeficiency virus (HIV) infection and acquired immune deficiency syndrome (AIDS), hypogammaglobulinemia, hematologic cancers such as leukaemia and lymphoma, lymphocytopenia (lymphopenia) of any origin, lupus erythematosus, cachexia, opioids abuse, mastocytosis, rheumatic fever, trypanosomiasis, and alcohol abuse. In some embodiments, immunosuppression is associated with immune checkpoint signaling (e.g., PD-1 or CTLA-4 signaling). In such non-deliberate immunosuppression situations, patients are usually treated with immunostimulants (e.g. cytokines) to boost immune system. However, due to the lack of specificity, such immunostimulants activate the immune system in general and may trigger an overactivation of the immune system.

[0390] In some embodiments, the methods of treating an immune suppression described herein activate or enhance immune response, increase CD8 to CD4 ratio, promote immune cell proliferation and/or differentiation, induce or enhance cytokine release (e.g., IL-2, IL-6, IFN-γ), prevent worsening of, arrest and/or ameliorate at least one symptom of an immune suppression in an individual in need thereof, and/or prevent death.

[0391] In some embodiments, the methods described herein are for treating autoimmune diseases. Autoimmune disease is a disease resulting from an immune response against a self-tissue or tissue component, including both self-antibody responses and cell-mediated responses. The term “autoimmune disease,” as used herein, encompasses organ-specific autoimmune diseases, in which an autoimmune response is directed against a single tissue, such as type I diabetes mellitus (T1D), Crohn's disease, ulcerative colitis, myasthenia gravis, vitiligo, Graves' disease, Hashimoto's disease, Addison's disease and autoimmune gastritis and autoimmune hepatitis. The term “autoimmune disease” also encompasses non-organ specific autoimmune diseases, in which an autoimmune response is directed against a component present in several or many organs throughout the body. Such autoimmune diseases include, for example, rheumatoid disease, systemic lupus erythematosus, progressive systemic sclerosis and variants, polymyositis and dermatomyositis. Additional autoimmune diseases include pernicious anemia including some of autoimmune gastritis, primary biliary cirrhosis, autoimmune thrombocytopenia, Sjogren's syndrome, multiple sclerosis and psoriasis. In some embodiments, the autoimmune disease is selected from the group consisting of diabetes, diabetes mellitus, arthritis (including rheumatoid arthritis, juvenile rheumatoid arthritis, osteoarthritis, psoriatic arthritis), multiple sclerosis, myasthenia gravis, systemic lupus erythematosis, autoimmune thyroiditis, dermatitis (including atopic dermatitis and eczematous dermatitis), psoriasis, Sjogren's Syndrome, including keratoconjunctivitis sicca secondary to Sjogren's Syndrome, alopecia greata, allergic responses due to arthropod bite reactions, Crohn's disease, aphthous ulcer, iritis, conjunctivitis, keratoconjunctivitis, ulcerative colitis, asthma, allergic asthma, cutaneous lupus erythematosus, scleroderma, vaginitis, proctitis, drug eruptions, leprosy reversal reactions, erythema nodosum leprosum, autoimmune uveitis, allergic encephalomyelitis, acute necrotizing hemorrhagic encephalopathy, idiopathic bilateral progressive sensorineural hearing loss, aplastic anemia, pure red cell anemia, idiopathic thrombocytopenia, polychondritis, Wegener's granulomatosis, chronic active hepatitis, Stevens-Johnson syndrome, idiopathic sprue, lichen planus, inflammatory bowel disease (IBD), Crohn's disease, Graves ophthalmopathy, sarcoidosis, primary biliary cirrhosis, uveitis posterior, and interstitial lung fibrosis. One skilled in the art understands that the methods of the invention can be applied to these or other autoimmune diseases, as desired.

[0392] In some embodiments, the methods of treating an autoimmune disease described herein prevent worsening of, arrest and/or ameliorate at least one symptom of an autoimmune disease in an individual in need thereof, prevent damage to healthy self tissues or organ, control, ameliorate and/or prevent infiltration of immune cells to healthy self tissue and/or organ, systemic inflammation, and/or cytokine storm, and/or prevent death.

[0393] In some embodiments, the methods of treating a graft rejection described herein prevent worsening of, arrest and/or ameliorate at least one symptom of a graft rejection in an individual in need thereof; prevent damage to donor/foreign tissues or organ; control, ameliorate and/or prevent infiltration of immune cells to donor/foreign tissues or organ, systemic inflammation, and/or cytokine storm; reduce Th17 cell activation; improve graft survival; prolong survival, increase survival rate, and/or prevent death. In some embodiments, the methods of treating a GvHD described herein prevent worsening of, arrest and/or ameliorate at least one symptom of a GvHD in an individual in need thereof; reduce Th17 cell activation; prevent damage to self/healthy tissues or organ; control, ameliorate and/or prevent infiltration of immune cells to self/healthy tissues or organ, systemic inflammation, and/or cytokine storm; improve graft survival; prolong survival, increase survival rate, and/or prevent death; and/or improve disease activity score (see, e.g., P. J. Martin, Biol Blood Marrow Transplant. 2009 July; 15(7):777-784).

[0394] In some embodiments, there is provided a method of selectively activating the activity (binding affinity to corresponding cytokine receptor or subunit thereof, and/or biological activity) of a cytokine or variant thereof (e.g., IL-2, IFN-α (e.g., IFN-α2b), IFN-γ, IL-10, IL-12, or IL-23) to a cell expressing a target antigen (e.g., CTLA-4, PD-L1, PD-L2, CD123, CD25, HER2, PD-1, CD3, CD4, or CD8) in an individual (e.g., human), comprising administering to the individual an effective amount of an immunomodulatory molecule (or pharmaceutical compositions thereof), wherein the immunomodulatory molecule comprises: a) an antigen-binding protein (e.g., antibody such as full-length antibody, or antigen-binding fragment-hinge-Fc fusion protein such as ligand/receptor-hinge-Fc fusion protein) specifically recognizing a target antigen (e.g., CTLA-4, PD-L1, PD-L2, CD123, CD25, HER2, PD-1, CD3, CD4, or CD8); and b) a cytokine (e.g., IL-2, IFN-α (e.g., IFN-α2b), IFN-γ, IL-10, IL-12, or IL-23) or variant thereof, wherein the antigen-binding protein comprises an antigen-binding polypeptide (e.g., antibody heavy chain, or antigen-binding fragment-hinge-Fc fusion polypeptide such as ligand/receptor-hinge-Fc fusion polypeptide) comprising from N′ to C′: an antigen-binding fragment (e.g., ligand, receptor, VHH, scFv, or VH), a hinge region, and an Fc domain subunit or portion thereof (e.g., CH2+CH3, or CH2 only), wherein the cytokine or variant thereof is positioned at (e.g., at the N′ of, at the C′ of, or within) the hinge region; and wherein the activity of the cytokine or variant thereof is selectively activated upon binding of the antigen-binding protein to the target antigen. In some embodiments, there is provided a method of selectively activating the activity (binding affinity to corresponding cytokine receptor or subunit thereof, and/or biological activity) of a cytokine or variant thereof (e.g., IL-2, IFN-α (e.g., IFN-α2b), IFN-γ, IL-10, IL-12, or IL-23) to a cell expressing a target antigen (e.g., CTLA-4, PD-L1, PD-L2, CD25, CD123, HER2, PD-1, CD3, CD4, or CD8) in an individual (e.g., human), comprising administering to the individual an effective amount of an immunomodulatory molecule (or pharmaceutical compositions thereof), wherein the immunomodulatory molecule comprises: a) an antibody (e.g., full-length antibody, heavy chain only antibody, or antigen-binding fragment fused to an Fc domain subunit or portion thereof via a hinge region) specifically recognizing a target antigen (e.g., CTLA-4, PD-L1, PD-L2, CD25, CD123, HER2, PD-1, CD3, CD4, or CD8); and b) a cytokine (e.g., IL-2, IFN-α (e.g., IFN-α2b), IFN-γ, IL-10, IL-12, or IL-23) or variant thereof, wherein the antibody comprises a heavy chain comprising a hinge region, and wherein the cytokine or variant thereof is positioned at the hinge region (e.g., within the hinge region, or between the C-terminus of CH1 and the N-terminus of the hinge region) of the heavy chain; and wherein the activity of the cytokine or variant thereof is selectively activated upon binding of the antibody to the target antigen. In some embodiments, there is provided a method of selectively activating the activity (binding affinity to corresponding cytokine receptor or subunit thereof, and/or biological activity) of a cytokine or variant thereof (e.g., IL-2, IFN-α (e.g., IFN-α2b), IFN-γ, IL-10, IL-12, or IL-23) to a cell expressing a target antigen (e.g., CTLA-4, PD-L1, PD-L2, CD25, CD123, HER2, PD-1, CD3, CD4, or CD8) in an individual (e.g., human), comprising administering to the individual an effective amount of an immunomodulatory molecule (or pharmaceutical compositions thereof), wherein the immunomodulatory molecule comprises: a) an antibody (e.g., full-length antibody, or antigen-binding fragment fused to an Fc domain subunit or portion thereof via a hinge region) specifically recognizing a target antigen (e.g., CTLA-4, PD-L1, PD-L2, CD25, CD123, HER2, PD-1, CD3, CD4, or CD8); and b) a cytokine (e.g., IL-2, IFN-α (e.g., IFN-α2b), IFN-γ, IL-10, IL-12, or IL-23) or variant thereof, wherein the antibody comprises a heavy chain comprising from N-terminus to C-terminus: a VH domain, optionally a CH1 domain, the cytokine or variant thereof at a hinge region, a CH2 domain, and optionally a CH3 domain; and wherein the activity of the cytokine or variant thereof is selectively activated upon binding of the antibody to the target antigen. In some embodiments, there is provided a method of selectively activating the activity (binding affinity to corresponding cytokine receptor or subunit thereof, and/or biological activity) of a cytokine or variant thereof (e.g., IL-2, IFN-α (e.g., IFN-α2b), IFN-γ, IL-10, IL-12, or IL-23) to a cell expressing a target antigen (e.g., CTLA-4, PD-L1, PD-L2, CD25, CD123, HER2, PD-1, CD3, CD4, or CD8) in an individual (e.g., human), comprising administering to the individual an effective amount of an immunomodulatory molecule (or pharmaceutical compositions thereof), wherein the immunomodulatory molecule comprises: a) a full-length antibody specifically recognizing a target antigen (e.g., CTLA-4, PD-L1, PD-L2, CD25, CD123, HER2, PD-1, CD3, CD4, or CD8); and b) a cytokine (e.g., IL-2, IFN-α (e.g., IFN-α2b), IFN-γ, IL-10, IL-12, or IL-23) or variant thereof, wherein the cytokine or variant thereof is positioned at the hinge region (e.g., within the hinge region, or between the C-terminus of CH1 and the N-terminus of the hinge region) of a heavy chain of the full-length antibody; and wherein the activity of the cytokine or variant thereof is selectively activated upon binding of the full-length antibody to the target antigen. In some embodiments, in the presence of binding of the antigen-binding protein (e.g., antibody such as full-length antibody, or antigen-binding fragment-hinge-Fc fusion protein such as ligand/receptor-hinge-Fc fusion protein) or antigen-binding fragment (e.g., ligand, receptor, V_{H}H, scFv, Fab) to the target antigen, the activity (binding affinity to corresponding cytokine receptor or subunit thereof, and/or biological activity) of the cytokine or variant thereof increases at least about 20% (such as at least about any of 30%, 40%, 50%, 60%, 70%, 80%, 90%, 100%, 200%, 300%, 400%, 500%, or more) compared to that in the absence of binding of the antigen-binding protein (e.g., antibody such as full-length antibody, or antigen-binding fragment-hinge-Fc fusion protein such as ligand/receptor-hinge-Fc fusion protein) or antigen-binding fragment (e.g., ligand, receptor, VHH, scFv, Fab) to the target antigen. In some embodiments, in the absence of binding of the antigen-binding protein (e.g., antibody such as full-length antibody, or antigen-binding fragment-hinge-Fc fusion protein such as ligand/receptor-hinge-Fc fusion protein or antigen-binding fragment (e.g., ligand, receptor, VHH, scFv, Fab) to the target antigen, the activity (binding affinity to corresponding cytokine receptor or subunit thereof, and/or biological activity) of the cytokine or variant thereof positioned at the hinge region of the heavy chain is no more than about 70% (such as no more than about any of 60%, 50%, 40%, 30%, 20%, 10%, 9%, 8%, 7%, 6%, 5%, 4%, 3%, 2%, 1%, 0.9%,0.8%, 0.7%, 0.6%, 0.5%, 0.4%, 0.3%, 0.2%, 0.1%, or 0%) of that of a corresponding cytokine or variant thereof in a free state. In some embodiments, the cytokine or variant thereof is a cytokine variant, and wherein the activity (binding affinity to corresponding cytokine receptor or subunit thereof, and/or biological activity) of the cytokine variant in a free state is no more than about 80% (such as no more than about any of 70%, 60%, 500/, 40%, 30%, 20%, 10%, or 5%) of that of a corresponding wildtype cytokine in a free state.

[0395] Administration of the immunomodulatory molecules described herein or pharmaceutical compositions thereof may be carried out in any convenient manner, including by injection or transfusion. The route of administration is in accordance with known and accepted methods, such as by single or multiple bolus or infusion over a long period of time in a suitable manner. The immunomodulatory molecules or pharmaceutical compositions thereof may be administered to a patient transarterially, subcutaneously, intradermally, intratumorally, intranodally, intramedullary, intramuscularly, intravenously, or intraperitoneally. In some embodiments, the immunomodulatory molecule or pharmaceutical composition thereof is administered systemically. In some embodiments, the immunomodulatory molecule or pharmaceutical composition thereof is administered to an individual by infusion, such as intravenous infusion. Infusion techniques for immunotherapy are known in the art (see, e.g., Rosenberg el al., New Eng. J. of Med. 319: 1676 (1988)). In some embodiments, the immunomodulatory molecule or pharmaceutical composition thereof is administered to an individual by intradermal or subcutaneous (i.e., beneath the skin) injection. For subcutaneous injections, the immunomodulatory molecules or pharmaceutical compositions may be injected using a syringe. However, other devices for administration of the immunomodulatory molecules or pharmaceutical compositions are available such as injection devices; injector pens; auto-injector devices, needleless devices; and subcutaneous patch delivery systems. In some embodiments, the immunomodulatory molecule or pharmaceutical composition thereof is administered by intravenous injection. In some embodiments, the immunomodulatory molecule or pharmaceutical composition thereof is injected directly into a tumor, or a lymph node. In some embodiments, the immunomodulatory molecule or pharmaceutical composition thereof is administered locally to a site of tumor, such as directly into tumor cells, or to a tissue having tumor cells. In some embodiments, the immunomodulatory molecule or pharmaceutical composition thereof is administered by sustained release or extended-release means.

[0396] Dosages and desired drug concentration of pharmaceutical compositions of the present invention may vary depending on the particular use envisioned. The determination of the appropriate dosage or route of administration is well within the skill of an ordinary artisan. Animal experiments provide reliable guidance for the determination of effective doses for human therapy. Interspecies scaling of effective doses can be performed following the principles laid down by Mordenti, J. and Chappell, W. “The Use of Interspecies Scaling in Toxicokinetics,” In Toxicokinetics and New Drug Development, Yacobi et al., Eds, Pergamon Press, New York 1989, pp. 42-46. It is within the scope of the present application that different formulations will be effective for different treatments and different disorders, and that administration intended to treat a specific organ or tissue may necessitate delivery in a manner different from that to another organ or tissue.

[0397] When in vivo administration of the immunomodulatory molecules described herein or pharmaceutical compositions thereof are used, normal dosage amounts may vary from about 1 μg/kg to about 10 mg/kg of mammal body weight depending upon the route of administration and mammal type. It is within the scope of the present application that different formulations will be effective for different treatments and different disorders, and that administration intended to treat a specific organ or tissue may necessitate delivery in a manner different from that to another organ or tissue. Moreover, dosages may be administered by one or more separate administrations, or by continuous infusion. For repeated administrations over several days or longer, depending on the condition, the treatment is sustained until a desired suppression of disease symptoms occurs. However, other dosage regimens may be useful. The progress of this therapy is easily monitored by conventional techniques and assays. In some embodiments, the immunomodulatory molecule described herein or pharmaceutical composition thereof is administered in an amount of about 1 μg/kg to about 10 mg/kg, such as any of about 1 μg/kg to about 500 μg/kg, about 500 μg/kg to about 1 mg/kg, about 1 mg/kg to about 10 mg/kg, about 1 μg/kg to about 1 mg/kg, about 1 μg/kg to about 200 μg/kg, about 100 μg/kg to about 500 μg/kg, about 100 μg/kg to about 1 mg/kg, or about 500 μg/kg to about 1 mg/kg.

[0398] In some embodiments, the immunomodulatory molecule described herein or pharmaceutical composition thereof is administered (e.g., infused) to the individual (e.g., human) over a period of time no more than about any of 24 hours, 20 hours, 15 hours, 10 hours, 8 hours, 6 hours, 3 hours, 2 hours, 1 hours, 30 minutes, or less. In some embodiments, the immunomodulatory molecule described herein or pharmaceutical composition thereof is administered (e.g., infused) to the individual (e.g., human) over a period of time of any one of about 30 minutes to about 1 hour, about 1 hour to about 2 hours, about 2 hours to about 4 hours, about 4 hours to about 6 hours, about 6 hours to about 8 hours, about 8 hours to about 10 hours, about 10 hours to about 12 hours, about 12 hours to about 18 hours, about 18 hours to about 24 hours, about 30 minutes to about 2 hours, about 2 hours to about 5 hours, about 5 hours to about 10 hours, about 10 hours to about 20 hours, about 30 minutes to about 10 hours, or about 30 minutes to about 24 hours.

[0399] In some embodiments, the immunomodulatory molecule described herein or pharmaceutical composition thereof is administered for a single time (e.g., bolus injection). In some embodiments, the immunomodulatory molecule described herein or pharmaceutical composition thereof is administered for multiple times (such as any of 2, 3, 4, 5, 6, or more times). If multiple administrations, they may be performed by the same or different routes and may take place at the same site or at alternative sites. The immunomodulatory molecule described herein or pharmaceutical composition thereof may be administered daily to once per year. The interval between administrations can be about any one of 24 hours to a year. Intervals can also be irregular (e.g., following tumor progression). In some embodiments, there is no break in the dosing schedule. The optimal dosage and treatment regime for a particular patient can readily be determined by one skilled in the art of medicine by monitoring the patient for signs of disease and adjusting the treatment accordingly. In some embodiments, the immunomodulatory molecule described herein or pharmaceutical composition thereof is administered once per day (daily), once per 2 days, once per 3 days, once per 4 days, once per 5 days, once per 6 days, once per week, once per 10 days, once every 2 weeks, once every 3 weeks, once every 4 weeks, once per month, once per 2 months. once per 3 months, once per 4 months, once per 5 months, once per 6 months, once per 7 months, once per 8 months, once per 9 months, or once per year. In some embodiments, the interval between administrations is about any one of 1 week to 2 weeks, 2 weeks to 1 month, 2 weeks to 2 months, 1 month to 2 months, 1 month to 3 months, 3 months to 6 months, or 6 months to a year. In some embodiments, the immunomodulatory molecule described herein or pharmaceutical composition thereof is administered once every three weeks.

[0400] In some embodiments, the pharmaceutical composition is administered in split doses, such as about any one of 2, 3, 4, 5, or more doses. In some embodiments, the split doses are administered over about a week, a month, 2 months, 3 months, or longer. In some embodiments, the dose is equally split. In some embodiments, the split doses are about 20%, about 30% and about 50% of the total dose. In some embodiments, the interval between consecutive split doses is about 1 day, 2 days, 3 days, 1 week, 2 weeks, 3 weeks, a month, or longer. For repeated administrations over several days or longer, depending on the condition, the treatment is sustained until a desired suppression of disease symptoms occurs. However, other dosage regimens may be useful. The progress of this therapy is easily monitored by conventional techniques and assays.

### VII. Articles of Manufacture and Kits

[0401] Further provided are kits, unit dosages, and articles of manufacture comprising any of the immunomodulatory molecules described herein (such as described in any of FIGS. 1A-1W and 11A-15D, Examples, and Sequence Listing herein). In some embodiments, a kit is provided which contains any one of the pharmaceutical compositions described herein and preferably provides instructions for its use, such as for use in the treatment of the disorders described herein (e.g., cancer, infection, or autoimmune disease).

[0402] Kits of the invention include one or more containers comprising an immunomodulatory molecule described herein for treating a disease. For example, the instructions comprise a description of administration of the immunomodulatory molecule to treat a disease, such as cancer. The kit may further comprise a description of selecting an individual (e.g., human) suitable for treatment based on identifying whether that individual has the disease and the stage of the disease. The instructions relating to the use of the immunomodulatory molecule generally include information as to dosage, dosing schedule, and route of administration for the intended treatment. The containers may be unit doses, bulk packages (e.g., multi-dose packages) or sub-unit doses. Instructions supplied in the kits of the invention are typically written instructions on a label or package insert (e.g., a paper sheet included in the kit), but machine-readable instructions (e.g., instructions carried on a magnetic or optical storage disk) are also acceptable. The kits of the present application are in suitable packaging. Suitable packaging includes, but is not limited to, vials, bottles, jars, flexible packaging (e.g., sealed Mylar or plastic bags), and the like. Also contemplated are packages for use in combination with a specific device, such as an infusion device such as a minipump. A kit may have a sterile access port (for example, the container may be an intravenous solution bag or a vial having a stopper pierceable by a hypodermic injection needle). At least one active agent in the composition is an immunomodulatory molecule as described herein. The container may further comprise a second pharmaceutically active agent. The kits may optionally provide additional components such as buffers and interpretive information. Normally, the kit comprises a container and a label or package insert(s) on or associated with the container.

[0403] The present application thus also provides articles of manufacture, which include vials (such as sealed vials), bottles, jars, flexible packaging, and the like. The article of manufacture can comprise a container and a label or package insert on or associated with the container. Suitable containers include, for example, bottles, vials, syringes, etc. The containers may be formed from a variety of materials such as glass or plastic. Generally, the container holds a composition which is effective for treating a disease or disorder (such as cancer) described herein, and may have a sterile access port (for example, the container may be an intravenous solution bag or a vial having a stopper pierceable by a hypodermic injection needle). The label or package insert indicates that the composition is used for treating the particular condition in an individual. The label or package insert will further comprise instructions for administering the composition to the individual. The label may indicate directions for reconstitution and/or use. The container holding the pharmaceutical composition may be a multi-use vial, which allows for repeat administrations (e.g. from 2-6 administrations) of the reconstituted formulation. Package insert refers to instructions customarily included in commercial packages of therapeutic products that contain information about the indications, usage, dosage, administration, contraindications and/or warnings concerning the use of such therapeutic products. Additionally, the article of manufacture may further comprise a second container comprising a pharmaceutically-acceptable buffer, such as bacteriostatic water for injection (BWFI), phosphate-buffered saline, Ringer's solution and dextrose solution. It may further include other materials desirable from a commercial and user standpoint, including other buffers, diluents, filters, needles, and syringes.

[0404] The kits or article of manufacture may include multiple unit doses of the pharmaceutical composition and instructions for use, packaged in quantities sufficient for storage and use in pharmacies, for example, hospital pharmacies and compounding pharmacies.

### EXEMPLARY EMBODIMENTS

[0405] Embodiment 1. An immunomodulatory molecule comprising a first binding domain specifically recognizing a first target molecule and a second binding domain specifically recognizing a second target molecule, wherein the first binding domain upon binding to the first target molecule up-regulates an immune response, and wherein the second binding domain upon binding to the second target molecule down-regulates the immune response.

[0406] Embodiment 2. The immunomodulatory molecule of embodiment 1, wherein the first binding domain upon binding to the first target molecule up-regulates the immune response by an activity (“up-regulated activity”) selected from one or more of up-regulating release of an immunostimulatory cytokine, down-regulating release of an immunosuppressive cytokine, up-regulating immune cell proliferation, up-regulating immune cell differentiation, up-regulating immune cell activation, up-regulating cytotoxicity against a tumor cell, and up-regulating elimination of an infectious agent.

[0407] Embodiment 3. The immunomodulatory molecule of embodiment 1 or 2, wherein the second binding domain upon binding to the second target molecule down-regulates the immune response by an activity (“down-regulated activity”) selected from one or more of down-regulating release of an immunostimulatory cytokine, up-regulating release of an immunosuppressive cytokine, down-regulating immune cell proliferation, down-regulating immune cell differentiation, down-regulating immune cell activation, down-regulating cytotoxicity against a tumor cell, and down-regulating elimination of an infectious agent.

[0408] Embodiment 4. The immunomodulatory molecule of any one of embodiments 1-3, wherein the immunostimulatory cytokine is selected from the group consisting of IL-1, IL-2, IL-3, IL-4, IL-5, IL-6, IL-7, IL-8, IL-9, IL-12, IL-15, IL-17, IL-18, IL-21, IL-22, IL-23, IL-27, IFN-α, IFN-β, IFN-γ, TNF-α, erythropoietin, thrombopoietin, G-CSF, M-CSF, SCF, and GM-CSF.

[0409] Embodiment 5. The immunomodulatory molecule of any one of embodiments 1-4, wherein the immunosuppressive cytokine is selected from the group consisting of IL-1Ra, IL-4, IL-5, IL-6, IL-10, IL-11, IL-13, IL-27, IL-33, IL-35, IL-37, IL-39, IFN-α, LIF, and TGF-β.

[0410] Embodiment 6. The immunomodulatory molecule of any one of embodiments 1-5, wherein the first target molecule and/or the second target molecule is a stimulatory checkpoint molecule.

[0411] Embodiment 7. The immunomodulatory molecule of embodiment 6, wherein the stimulatory checkpoint molecule is selected from the group consisting of CD27, CD28, CD40, CD122, CD137, OX40, GITR, and ICOS.

[0412] Embodiment 8. The immunomodulatory molecule of embodiment 6 or 7, wherein the first binding domain is an agonist antibody or antigen-binding fragment thereof.

[0413] Embodiment 9. The immunomodulatory molecule of embodiment 6 or 7, wherein the first binding domain is an agonist ligand or variant thereof.

[0414] Embodiment 10. The immunomodulatory molecule of embodiment 9, wherein the agonist ligand is selected from the group consisting of CD27L (TNFSF7, CD70), CD40L (CD154), CD80, CD86, CD137L, OX40L (CD252), GITRL, and ICOSLG (CD275).

[0415] Embodiment 11. The immunomodulatory molecule of embodiment 9 or 10, wherein the first binding domain is a variant of an agonist ligand, and wherein the variant of the agonist ligand has increased or decreased binding affinity to the first target molecule compared to the agonist ligand.

[0416] Embodiment 12. The immunomodulatory molecule of any one of embodiments 6-11, wherein the second binding domain is an antagonist antibody or antigen-binding fragment thereof.

[0417] Embodiment 13. The immunomodulatory molecule of any one of embodiments 6-11, wherein the second binding domain is an antagonist ligand or variant thereof.

[0418] Embodiment 14. The immunomodulatory molecule of embodiment 13, wherein the second binding domain is a variant of an antagonist ligand, and wherein the variant of the antagonist ligand has increased or decreased binding affinity to the second target molecule compared to the antagonist ligand.

[0419] Embodiment 15. The immunomodulatory molecule of any one of embodiments 1-5, wherein the first target molecule and/or the second target molecule is a receptor of an immunostimulatory cytokine.

[0420] Embodiment 16. The immunomodulatory molecule of embodiment 15, wherein the immunostimulatory cytokine is selected from the group consisting of IL-1, IL-2, IL-3, IL-4, IL-5, IL-6, IL-7, IL-8, IL-9, IL-12, IL-15, IL-17, IL-18, IL-21, IL-22, IL-23, IL-27, IFN-α, IFN-β, IFN-γ, TNF-α, erythropoietin, thrombopoietin, G-CSF, M-CSF, SCF, and GM-CSF.

[0421] Embodiment 17. The immunomodulatory molecule of embodiment 15 or 16, wherein the first binding domain is the immunostimulatory cytokine or variant thereof.

[0422] Embodiment 18. The immunomodulatory molecule of embodiment 17, wherein the first binding domain is a variant of an immunostimulatory cytokine, and wherein the variant of the immunostimulatory cytokine has increased or decreased binding affinity to the first target molecule compared to the immunostimulatory cytokine.

[0423] Embodiment 19. The immunomodulatory molecule of embodiment 17 or 18, wherein the first binding domain is IL-12, IL-2, or variant thereof.

[0424] Embodiment 20. The immunomodulatory molecule of embodiment 15 or 16, wherein the first binding domain is an agonist antibody or antigen-binding fragment thereof.

[0425] Embodiment 21. The immunomodulatory molecule of any one of embodiments 15-20, wherein the second binding domain is an antagonist antibody or antigen-binding fragment thereof.

[0426] Embodiment 22. The immunomodulatory molecule of any one of embodiments 15-20, wherein the second binding domain is antagonist ligand or variant thereof.

[0427] Embodiment 23. The immunomodulatory molecule of embodiment 22, wherein the second binding domain is a variant of an antagonist ligand, and wherein the variant of the antagonist ligand has increased or decreased binding affinity to the second target molecule compared to the antagonist ligand.

[0428] Embodiment 24. The immunomodulatory molecule of any one of embodiments 1-5, wherein the first target molecule and/or the second target molecule is an activating immune cell surface receptor.

[0429] Embodiment 25. The immunomodulatory molecule of embodiment 24, wherein the activating immune cell surface receptor is selected from the group consisting of CD2, CD3, CD4, CD8, CD16, CD56, CD96, CD161, CD226, NKG2C, NKG2D, NKG2E, NKG2F, NKG2H, NKp30, NKp44, NKp46, CD11c, CD11b, CD13, CD45RO, CD33, CD123, CD62L, CD45RA, CD3δ, CD163, and CD206.

[0430] Embodiment 26. The immunomodulatory molecule of embodiment 24 or 25, wherein the first binding domain is an agonist antibody or antigen-binding fragment thereof.

[0431] Embodiment 27. The immunomodulatory molecule of embodiment 24 or 25, wherein the first binding domain is an agonist ligand or variant thereof.

[0432] Embodiment 28. The immunomodulatory molecule of embodiment 27, wherein the first binding domain is a variant of an agonist ligand, and wherein the variant of the agonist ligand has increased or decreased binding affinity to the first target molecule compared to the agonist ligand.

[0433] Embodiment 29. The immunomodulatory molecule of any one of embodiments 24-28, wherein the second binding domain is an antagonist antibody or antigen-binding fragment thereof.

[0434] Embodiment 30. The immunomodulatory molecule of any one of embodiments 24-28, wherein the second binding domain is an antagonist ligand or variant thereof.

[0435] Embodiment 31. The immunomodulatory molecule of embodiment 30, wherein the second binding domain is a variant of an antagonist ligand, and wherein the variant of the antagonist ligand has increased or decreased binding affinity to the second target molecule compared to the antagonist ligand.

[0436] Embodiment 32. The immunomodulatory molecule of any one of embodiments 1-5, wherein the first target molecule and/or the second target molecule is an inhibitory checkpoint molecule.

[0437] Embodiment 33. The immunomodulatory molecule of embodiment 32, wherein the inhibitory checkpoint molecule is selected from the group consisting of PD-1, PD-L1, PD-L2, CTLA-4, LAG-3, TIM-3, HHLA2, CD47, CXCR4, CD160, CD73, BLTA, B7-H4, TIGIT, Siglec7, Siglec9, and VISTA.

[0438] Embodiment 34. The immunomodulatory molecule of embodiment 32 or 33, wherein the first binding domain is an antagonist ligand or variant thereof.

[0439] Embodiment 35. The immunomodulatory molecule of embodiment 34, wherein the first binding domain is a variant of an antagonist ligand, and wherein the variant of the antagonist ligand has increased or decreased binding affinity to the first target molecule compared to the antagonist ligand.

[0440] Embodiment 36. The immunomodulatory molecule of embodiment 32 or 33, wherein the first binding domain is an antagonist antibody or antigen-binding fragment thereof.

[0441] Embodiment 37. The immunomodulatory molecule of any one of embodiments 32-36, wherein the second binding domain is an agonist antibody or antigen-binding fragment thereof.

[0442] Embodiment 38. The immunomodulatory molecule of embodiment 37, wherein the agonist antibody or antigen-binding fragment thereof specifically recognizes PD-1, TIGIT, LAG-3, TIM-3, or CTLA-4.

[0443] Embodiment 39. The immunomodulatory molecule of any one of embodiments 32-36, wherein the second binding domain is an agonist ligand or variant thereof.

[0444] Embodiment 40. The immunomodulatory molecule of embodiment 39, (i) wherein the second target molecule is PD-1, and wherein the second binding domain is PD-L1, PD-L2, or variant thereof; (ii) wherein the second target molecule is TIGIT, and wherein the second binding domain is CD112, CD155, or variant thereof; (iii) wherein the second target molecule is LAG-3, and wherein the second binding domain is MHC II, LSECtin, or variant thereof; (iv) wherein the second target molecule is TIM-3, and wherein the second binding domain is Galectin-9, Caecam-1, HMGB-1, phosphatidylserine, or variant thereof; or (v) wherein the second target molecule is CTLA-4, and wherein the second binding domain is CD80, CD86, or variant thereof.

[0445] Embodiment 41. The immunomodulatory molecule of embodiment 40, wherein the second binding domain is a variant of an agonist ligand, and wherein the variant of the agonist ligand has increased or decreased binding affinity to the second target molecule compared to the agonist ligand.

[0446] Embodiment 42. The immunomodulatory molecule of any one of embodiments 39-41, wherein the second binding domain comprises an extracellular domain of the agonist ligand or variant thereof.

[0447] Embodiment 43. The immunomodulatory molecule of any one of embodiments 1-5, wherein the first target molecule and/or the second target molecule is a receptor of an immunosuppressive cytokine.

[0448] Embodiment 44. The immunomodulatory molecule of embodiment 43, wherein the immunosuppressive cytokine is selected from the group consisting of IL-1Ra, IL-4, IL-5, IL-6, IL-10, IL-11, IL-13, IL-27, IL-33, IL-35, IFN-α, LIF, and TGF-β.

[0449] Embodiment 45. The immunomodulatory molecule of embodiment 43 or 44, wherein the second binding domain is the immunosuppressive cytokine or variant thereof.

[0450] Embodiment 46. The immunomodulatory molecule of embodiment 45, wherein the second binding domain is a variant of the immunosuppressive cytokine, wherein the variant of the immunosuppressive cytokine has increased or decreased binding affinity to the second target molecule compared to the immunosuppressive cytokine.

[0451] Embodiment 47. The immunomodulatory molecule of embodiment 45 or 46, wherein the second binding domain is IL-10 or variant thereof.

[0452] Embodiment 48. The immunomodulatory molecule of embodiment 45 or 46, wherein the second binding domain is TGF-β or variant thereof.

[0453] Embodiment 49. The immunomodulatory molecule of embodiment 43 or 44, wherein the second binding domain is an agonist antibody or antigen-binding fragment thereof.

[0454] Embodiment 50. The immunomodulatory molecule of any one of embodiments 43-49, wherein the first binding domain is an antagonist antibody or antigen-binding fragment thereof.

[0455] Embodiment 51. The immunomodulatory molecule of any one of embodiments 43-49, wherein the first binding domain is antagonist ligand or variant thereof.

[0456] Embodiment 52. The immunomodulatory molecule of embodiment 51, wherein the first binding domain is a variant of an antagonist ligand, and wherein the variant of the antagonist ligand has increased or decreased binding affinity to the first target molecule compared to the antagonist ligand.

[0457] Embodiment 53. The immunomodulatory molecule of any one of embodiments 1-5, wherein the first target molecule and/or the second target molecule is an inhibitory immune cell surface receptor.

[0458] Embodiment 54. The immunomodulatory molecule of embodiment 53, wherein the inhibitory immune cell surface receptor is selected from the group consisting of CD5, NKG2A, NKG2B, KLRG1, FCRL4, Siglec2, CD72, CD244, GP49B, Lair-1, PirB, PECAM-1, CD200R, ILT2, and KIR2DL.

[0459] Embodiment 55. The immunomodulatory molecule of embodiment 53 or 54, wherein the second binding domain is an agonist antibody or antigen-binding fragment thereof.

[0460] Embodiment 56. The immunomodulatory molecule of embodiment 53 or 54, wherein the second binding domain is an agonist ligand or variant thereof.

[0461] Embodiment 57. The immunomodulatory molecule of embodiment 56, wherein the second binding domain is a variant of an agonist ligand, wherein the variant of the agonist ligand has increased or decreased binding affinity to the second target molecule compared to the agonist ligand.

[0462] Embodiment 58. The immunomodulatory molecule of any one of embodiments 53-57, wherein the first binding domain is an antagonist antibody or antigen-binding fragment thereof.

[0463] Embodiment 59. The immunomodulatory molecule of any one of embodiments 53-57, wherein the first binding domain is an antagonist ligand or variant thereof.

[0464] Embodiment 60. The immunomodulatory molecule of embodiment 59, wherein the first binding domain is a variant of an antagonist ligand, and wherein the variant of the antagonist ligand has increased or decreased binding affinity to the first target molecule compared to the antagonist ligand.

[0465] Embodiment 61. The immunomodulatory molecule of any one of embodiments 1-5, wherein the first binding domain is IL-12 or variant thereof, and wherein the second binding domain is an agonist antibody or antigen-binding fragment thereof specifically recognizing PD-1.

[0466] Embodiment 62. The immunomodulatory molecule of any one of embodiments 1-5, wherein the first binding domain is IL-12 or variant thereof, and wherein the second binding domain is PD-L1 or variant thereof.

[0467] Embodiment 63. The immunomodulatory molecule of embodiment 62, wherein the second binding domain is a variant of PD-L1, and wherein the variant of PD-L1 has increased or decreased binding affinity to the second target molecule compared to PD-L1.

[0468] Embodiment 64. The immunomodulatory molecule of any one of embodiments 1-5, wherein the first binding domain is IL-12 or variant thereof, and wherein the second binding domain is PD-L2 or variant thereof.

[0469] Embodiment 65. The immunomodulatory molecule of embodiment 64, wherein the second binding domain is a variant of PD-L2, and wherein the variant of PD-L2 has increased or decreased binding affinity to the second target molecule compared to PD-L2.

[0470] Embodiment 66. The immunomodulatory molecule of any one of embodiments 61-65, wherein the first binding domain is a variant of IL-12, and wherein the variant of IL-12 has increased or decreased binding affinity to the first target molecule compared to IL-12.

[0471] Embodiment 67. The immunomodulatory molecule of any one of embodiments 1-5, wherein the first binding domain is IL-2 or variant thereof, and wherein the second binding domain is an agonist antibody or antigen-binding fragment thereof specifically recognizing PD-1.

[0472] Embodiment 68. The immunomodulatory molecule of any one of embodiments 1-5, wherein the first binding domain is IL-2 or variant thereof, and wherein the second binding domain is PD-L1 or variant thereof.

[0473] Embodiment 69. The immunomodulatory molecule of embodiment 68, wherein the second binding domain is a variant of PD-L1, and wherein the variant of PD-L1 has increased or decreased binding affinity to the second target molecule compared to PD-L1.

[0474] Embodiment 70. The immunomodulatory molecule of any one of embodiments 1-5, wherein the first binding domain is IL-2 or variant thereof, and wherein the second binding domain is PD-L2 or variant thereof.

[0475] Embodiment 71. The immunomodulatory molecule of embodiment 70, wherein the second binding domain is a variant of PD-L2, and wherein the variant of PD-L2 has increased or decreased binding affinity to the second target molecule compared to PD-L2.

[0476] Embodiment 72. The immunomodulatory molecule of any one of embodiments 67-71, wherein the first binding domain is a variant of IL-2, and wherein the variant of IL-2 has increased or decreased binding affinity to the first target molecule compared to IL-2.

[0477] Embodiment 73. The immunomodulatory molecule of any one of embodiments 1-72, wherein the immunomodulatory molecule comprises: i) an antigen-binding protein comprising an antigen-binding polypeptide; and ii) the first binding domain, wherein the antigen-binding polypeptide comprises from N-terminus to C-terminus: the second binding domain or portion thereof, a hinge region, and an Fc domain subunit or portion thereof, and wherein the first binding domain is positioned at the hinge region.

[0478] Embodiment 74. The immunomodulatory molecule of embodiment 73, wherein in the presence of binding of the second binding domain to the second target molecule, the activity of the first binding domain increases at least about 20% compared to that in the absence of binding of the second binding domain to the second target molecule.

[0479] Embodiment 75. The immunomodulatory molecule of embodiment 73 or 74, wherein in the absence of binding of the second binding domain to the second target molecule, the activity of the first binding domain positioned at the hinge region is no more than about 70% of that of a corresponding first binding domain in a free state.

[0480] Embodiment 76. The immunomodulatory molecule of any one of embodiments 73-75, wherein the antigen-binding protein comprises two antigen-binding polypeptides each comprising a hinge region, and wherein only one antigen-binding polypeptide comprises the first binding domain positioned at the hinge region.

[0481] Embodiment 77. The immunomodulatory molecule of any one of embodiments 73-75, wherein the antigen-binding protein comprises two antigen-binding polypeptides each comprising a hinge region, and wherein each antigen-binding polypeptide comprises a first binding domain positioned at the hinge region.

[0482] Embodiment 78. The immunomodulatory molecule of any one of embodiments 73-77, wherein the immunomodulatory molecule comprises two or more first binding domains, wherein the two or more first binding domains are positioned in tandem at the hinge region of the antigen-binding polypeptide.

[0483] Embodiment 79. The immunomodulatory molecule of any one of embodiments 73-78, wherein the first binding domain is an immunostimulatory cytokine or variant thereof.

[0484] Embodiment 80. The immunomodulatory molecule of embodiment 79, wherein the immunostimulatory cytokine is selected from the group consisting of IL-1, IL-2, IL-3, IL-4, IL-5, IL-6, IL-7, IL-8, IL-9, IL-12, IL-15, IL-17, IL-18, IL-21, IL-22, IL-23, IL-27, IFN-α, IFN-β, IFN-γ, TNF-α, erythropoietin, thrombopoietin, G-CSF, M-CSF, SCF, and GM-CSF.

[0485] Embodiment 81. The immunomodulatory molecule of embodiment 79 or 80, wherein the first binding domain is an immunostimulatory cytokine variant, and wherein the activity of the immunostimulatory cytokine variant in a free state is no more than about 80% of that of a corresponding wildtype immunostimulatory cytokine in a free state.

[0486] Embodiment 82. The immunomodulatory molecule of any one of embodiments 79-81, wherein the immunostimulatory cytokine or variant thereof is a monomeric immunostimulatory cytokine or variant thereof.

[0487] Embodiment 83. The immunomodulatory molecule of any one of embodiments 79-81, wherein the immunostimulatory cytokine or variant thereof is a dimeric immunostimulatory cytokine or variant thereof.

[0488] Embodiment 84. The immunomodulatory molecule of embodiment 83, wherein both subunits of the dimeric immunostimulatory cytokine or variant thereof are positioned in tandem at the hinge region of the antigen-binding polypeptide.

[0489] Embodiment 85. The immunomodulatory molecule of embodiment 83, wherein the antigen-binding protein comprises two antigen-binding polypeptides each comprising a hinge region, wherein one subunit of the dimeric immunostimulatory cytokine or variant thereof is positioned at the hinge region of one antigen-binding polypeptide, and wherein the other subunit of the dimeric immunostimulatory cytokine or variant thereof is positioned at the hinge region of the other antigen-binding polypeptide.

[0490] Embodiment 86. The immunomodulatory molecule of any one of embodiments 79-82, wherein the immunostimulatory cytokine or variant thereof is IL-2 or variant thereof.

[0491] Embodiment 87. The immunomodulatory molecule of embodiment 86, wherein the IL-2 variant comprises one or more mutations at a position selected from the group consisting of F24, K35, R38, F42, K43, E61, and P65 relative to a wildtype IL-2.

[0492] Embodiment 88. The immunomodulatory molecule of embodiment 86 or 87, wherein the IL-2 variant comprises one or more mutations selected from the group consisting of F24A, R38D, K43E, E61R, and P65L relative to a wildtype IL-2.

[0493] Embodiment 89. The immunomodulatory molecule of any one of embodiments 86-88, wherein the IL-2 variant comprises an R38D/K43E/E61R mutation relative to a wildtype IL-2.

[0494] Embodiment 90. The immunomodulatory molecule of any one of embodiments 79-81 and 83-85, wherein the immunostimulatory cytokine or variant thereof is IL-12 or variant thereof.

[0495] Embodiment 91. The immunomodulatory molecule of embodiment 90, wherein the IL-12 variant comprises one or more mutations within the p40 subunit at a position selected from the group consisting of E45, Q56, V57, K58, E59, F60, G61, D62, A63, G64, Q65, and C177 relative to a wildtype p40 subunit.

[0496] Embodiment 92. The immunomodulatory molecule of embodiment 90 or 91, wherein the IL-12 variant comprises one or more mutations within the p40 subunit selected from the group consisting of Q56A, V57A, K58A, E59A, F60A, G61A, D62A, A63S, G64A, and Q65A relative to a wildtype p40 subunit.

[0497] Embodiment 93. The immunomodulatory molecule of any one of embodiments 90-92, wherein the IL-12 variant comprises an E59A/F60A mutation within the p40 subunit relative to a wildtype p40 subunit.

[0498] Embodiment 94. The immunomodulatory molecule of any one of embodiments 90-92, wherein the IL-12 variant comprises an F60A mutation within the p40 subunit relative to a wildtype p40 subunit.

[0499] Embodiment 95. The immunomodulatory molecule of any one of embodiments 90-94, wherein the p40 subunit and the p35 subunit of the IL-12 or variant thereof are connected by a linker.

[0500] Embodiment 96. The immunomodulatory molecule of any one of embodiments 77-95, wherein the two or more first binding domains are the same.

[0501] Embodiment 97. The immunomodulatory molecule of any one of embodiments 77-95, wherein the two or more first binding domains are different.

[0502] Embodiment 98. The immunomodulatory molecule of any one of embodiments 73-97, wherein the second binding domain is an agonist ligand or variant thereof of an inhibitory checkpoint molecule.

[0503] Embodiment 99. The immunomodulatory molecule of embodiment 98, wherein the inhibitory checkpoint molecule is selected from the group consisting of PD-1, PD-L1, PD-L2, CTLA-4, LAG-3, TIM-3, HHLA2, CD47, CXCR4, CD160, CD73, BLTA, B7-H4, TIGIT, Siglec7, Siglec9, and VISTA.

[0504] Embodiment 100. The immunomodulatory molecule of embodiment 98 or 99, wherein the second binding domain is PD-L1 or variant thereof.

[0505] Embodiment 101. The immunomodulatory molecule of embodiment 100, wherein the PD-L1 variant has increased binding affinity to PD-1 compared to a wildtype PD-L1.

[0506] Embodiment 102. The immunomodulatory molecule of embodiment 100 or 101, wherein the PD-L1 variant comprises one or more mutations at a position selected from the group consisting of 154, Y56, E58, R113, M115, S117, and G119 relative to a wildtype PD-L1.

[0507] Embodiment 103. The immunomodulatory molecule of any one of embodiments 100-102, wherein the PD-L1 variant comprises one or more mutations selected from the group consisting of I54Q, Y56F, E58M, R 113T, M115L, S117A, and G119K relative to a wildtype PD-L1.

[0508] Embodiment 104. The immunomodulatory molecule of any one of embodiments 100-103, wherein the PD-L1 variant comprises an I54Q/Y56F/E58M/R113T/M115L/S117A/G119K mutation relative to a wildtype PD-L1.

[0509] Embodiment 105. The immunomodulatory molecule of embodiment 98 or 99, wherein the second binding domain is PD-L2 or variant thereof.

[0510] Embodiment 106. The immunomodulatory molecule of embodiment 105, wherein the PD-L2 variant has increased binding affinity to PD-1 compared to a wildtype PD-L2.

[0511] Embodiment 107. The immunomodulatory molecule of any one of embodiments 73-97, wherein the second binding domain is an agonist antibody or antigen-binding fragment thereof of an inhibitory checkpoint molecule.

[0512] Embodiment 108. The immunomodulatory molecule of embodiment 107, wherein the inhibitory checkpoint molecule is selected from the group consisting of PD-1, PD-L1, PD-L2, CTLA-4, LAG-3, TIM-3, HHLA2, CD47, CXCR4, CD160, CD73, BLTA, B7-H4, TIGIT, Siglec7, Siglec9, and VISTA.

[0513] Embodiment 109. The immunomodulatory molecule of embodiment 107 or 108, wherein the agonist antibody or antigen-binding fragment thereof specifically recognizes PD-1 (“anti-PD-1 agonist antibody or antigen-binding fragment thereof”).

[0514] Embodiment 110. The immunomodulatory molecule of any one of embodiments 107-109, wherein the agonist antibody or antigen-binding fragment thereof is a Fab.

[0515] Embodiment 111. The immunomodulatory molecule of any one of embodiments 107-109, wherein the agonist antibody or antigen-binding fragment thereof is an scFv.

[0516] Embodiment 112. The immunomodulatory molecule of any one of embodiments 73-111, wherein the antigen-binding protein comprises two or more second binding domains.

[0517] Embodiment 113. The immunomodulatory molecule of embodiment 112, wherein the two or more second binding domains or portions thereof are positioned in tandem at the N-terminus of the antigen-binding polypeptide.

[0518] Embodiment 114. The immunomodulatory molecule of embodiment 112 or 113, wherein the antigen-binding protein comprises two antigen-binding polypeptides each comprising a hinge region, and wherein only one antigen-binding polypeptide comprises the two or more second binding domains or portions thereof positioned in tandem at the N-terminus of the antigen-binding polypeptide.

[0519] Embodiment 115. The immunomodulatory molecule of embodiment 112 or 113, wherein the antigen-binding protein comprises two antigen-binding polypeptides each comprising a hinge region, and wherein each antigen-binding polypeptide comprises one or more second binding domains or portions thereof at the N-terminus of each antigen-binding polypeptide.

[0520] Embodiment 116. The immunomodulatory molecule of any one of embodiments 73-114, wherein the antigen-binding protein comprises two antigen-binding polypeptides each comprising a hinge region, wherein the first antigen-binding polypeptide comprises one or more second binding domains or portions thereof at the N-terminus of the first antigen-binding polypeptide, wherein the second antigen-binding polypeptide comprises a third binding domain or portion thereof at the N-terminus of the second antigen-binding polypeptide, and wherein the third binding domain specifically recognizing a third target molecule.

[0521] Embodiment 117. The immunomodulatory molecule of embodiment 116, wherein the third binding domain and the second binding domain are the same.

[0522] Embodiment 118. The immunomodulatory molecule of embodiment 116, wherein the third binding domain and the second binding domain are different.

[0523] Embodiment 119. The immunomodulatory molecule of any one of embodiments 116-118, wherein the third target molecule and the second target molecule are the same.

[0524] Embodiment 120. The immunomodulatory molecule of embodiment 116 or 118, wherein the third target molecule and the second target molecule are different.

[0525] Embodiment 121. The immunomodulatory molecule of any one of embodiments 73-120, comprising: i) a first antigen-binding polypeptide comprising from N-terminus to C-terminus: a first PD-L2 or PD-L1 or variant thereof, a second PD-L2 or PD-L1 or variant thereof, a p35 subunit and a p40 subunit of an IL-12 or variant thereof positioned in tandem at a first hinge region, and a first subunit of an Fc domain or portion thereof; ii) a second antigen-binding polypeptide comprising from N-terminus to C-terminus: a VH, an optional CH1, a second hinge region, and a second subunit of the Fc domain or portion thereof; and iii) a third antigen-binding polypeptide comprising from N-terminus to C-terminus: a VL, and an optional CL; wherein the VH and the VL and optionally the CH1 and the CL form a third binding domain specifically recognizing a third target molecule.

[0526] Embodiment 122. The immunomodulatory molecule of embodiment 121, wherein the third binding domain is an agonist antigen-binding fragment specifically recognizing PD-1.

[0527] Embodiment 123. The immunomodulatory molecule of any one of embodiments 73-120, comprising: i) a first antigen-binding polypeptide comprising from N-terminus to C-terminus: a first VH, an optional first CH1, a p35 subunit and a p40 subunit of an IL-12 or variant thereof positioned in tandem at a first hinge region, and a first subunit of an Fc domain or portion thereof; ii) a second antigen-binding polypeptide comprising from N-terminus to C-terminus: a second VH, an optional second CH1, a second hinge region, and a second subunit of the Fc domain or portion thereof; iii) a third antigen-binding polypeptide comprising from N-terminus to C-terminus: a first VL, and an optional first CL; and iv) a fourth antigen-binding polypeptide comprising from N-terminus to C-terminus: a second VL, and an optional second CL, wherein the first VH and the first VL and optionally the first CH1 and the first CL form the second binding domain which is an agonist antigen-binding fragment specifically recognizing PD-1, and wherein the second VH and the second VL and optionally the second CH1 and the second CL form a third binding domain specifically recognizing a third target molecule.

[0528] Embodiment 124. The immunomodulatory molecule of embodiment 123, wherein the third binding domain is an agonist antigen-binding fragment specifically recognizing PD-1.

[0529] Embodiment 125. The immunomodulatory molecule of any one of embodiments 73-120, comprising: i) a first antigen-binding polypeptide comprising from N-terminus to C-terminus: a first PD-L2 or PD-L1 or variant thereof, a p35 subunit and a p40 subunit of an IL-12 or variant thereof positioned in tandem at a first hinge region, and a first subunit of an Fc domain or portion thereof; and ii) a second antigen-binding polypeptide comprising from N-terminus to C-terminus: a second PD-L2 or PD-L1 or variant thereof, a second hinge region, and a second subunit of an Fc domain or portion thereof.

[0530] Embodiment 126. The immunomodulatory molecule of any one of embodiments 73-120, comprising: i) a first antigen-binding polypeptide comprising from N-terminus to C-terminus: a first PD-L2 or PD-L1 or variant thereof, a second PD-L2 or PD-L1 or variant thereof, a p35 subunit and a p40 subunit of an IL-12 or variant thereof positioned in tandem at a first hinge region, and a first subunit of an Fc domain or portion thereof; and ii) a second antigen-binding polypeptide comprising from N-terminus to C-terminus: a third PD-L2 or PD-L1 or variant thereof, a fourth PD-L2 or PD-L1 or variant thereof, a second hinge region, and a second subunit of the Fc domain or portion thereof.

[0531] Embodiment 127. The immunomodulatory molecule of any one of embodiments 73-120, comprising: i) a first antigen-binding polypeptide comprising from N-terminus to C-terminus: a first PD-L2 or PD-L1 or variant thereof, a p35 subunit of an IL-12 or variant thereof positioned at a first hinge region, and a first subunit of an Fc domain or portion thereof; and ii) a second antigen-binding polypeptide comprising from N-terminus to C-terminus: a second PD-L2 or PD-L1 or variant thereof, a p40 subunit of an IL-12 or variant thereof positioned at a second hinge region, and a second subunit of the Fc domain or portion thereof.

[0532] Embodiment 128. The immunomodulatory molecule of any one of embodiments 73-120, comprising: i) a first antigen-binding polypeptide comprising from N-terminus to C-terminus: a p35 subunit or a p40 subunit of an IL-12 or variant thereof positioned at a first hinge region, and a first subunit of an Fc domain or portion thereof; and ii) a second antigen-binding polypeptide comprising from N-terminus to C-terminus: a first PD-L2 or PD-L1 or variant thereof, a second PD-L2 or PD-L1 or variant thereof, a p40 subunit or a p35 subunit of an IL-12 or variant thereof positioned at a second hinge region, and a second subunit of the Fc domain or portion thereof.

[0533] Embodiment 129. The immunomodulatory molecule of any one of embodiments 73-120, comprising: i) a first antigen-binding polypeptide comprising from N-terminus to C-terminus: a first VH, an optional first CH1, a p35 subunit or a p40 subunit of an IL-12 or variant thereof positioned at a first hinge region, and a first subunit of an Fc domain or portion thereof; ii) a second antigen-binding polypeptide comprising from N-terminus to C-terminus: a second VH, an optional second CH1, a p40 subunit or a p35 subunit of an IL-12 or variant thereof positioned at a second hinge region, and a second subunit of the Fc domain or portion thereof; iii) a third antigen-binding polypeptide comprising from N-terminus to C-terminus: a first VL, and an optional first CL; and iv) a fourth antigen-binding polypeptide comprising from N-terminus to C-terminus: a second VL, and an optional second CL, wherein the first VH and the first VL and optionally the first CH1 and the first CL form the second binding domain which is an agonist antigen-binding fragment specifically recognizing PD-1, and wherein the second VH and the second VL and optionally the second CH1 and the second CL form a third binding domain specifically recognizing a third target molecule.

[0534] Embodiment 130. The immunomodulatory molecule of embodiment 129, wherein the third binding domain is an agonist antigen-binding fragment specifically recognizing PD-1.

[0535] Embodiment 131. The immunomodulatory molecule of any one of embodiments 1-72, wherein the immunomodulatory molecule comprises an antigen-binding protein comprising an antigen-binding polypeptide, wherein the antigen-binding polypeptide comprises from N′ to C′: the first binding domain or portion thereof, the second binding domain or portion thereof, an optional hinge region, and an Fc domain subunit or portion thereof.

[0536] Embodiment 132. The immunomodulatory molecule of embodiment 131, wherein the second binding domain is an agonist Fab or an agonist scFv that specifically recognizes an inhibitory checkpoint molecule.

[0537] Embodiment 133. The immunomodulatory molecule of embodiment 131, wherein the second binding domain is an agonist ligand or variant thereof of an inhibitory checkpoint molecule.

[0538] Embodiment 134. The immunomodulatory molecule of embodiment 133, wherein the second binding domain is PD-L1 or PD-L2 or variant thereof.

[0539] Embodiment 135. The immunomodulatory molecule of any one of embodiments 131-134, wherein the first binding domain is an immunostimulatory cytokine or variant thereof.

[0540] Embodiment 136. The immunomodulatory molecule of embodiment 135, wherein the immunostimulatory cytokine or variant thereof is IL-2 or IL-12 or variant thereof.

[0541] Embodiment 137. The immunomodulatory molecule of any one of embodiments 131-136, wherein the antigen-binding protein comprises two antigen-binding polypeptides each comprising a hinge region, wherein the first antigen-binding polypeptide comprises from N′ to C′: the first binding domain or portion thereof, the second binding domain or portion thereof, a first hinge region, and a first subunit of an Fc domain or portion thereof; wherein the second antigen-binding polypeptide comprises from N′ to C′: a third binding domain or portion thereof, a second hinge region, and a second subunit of the Fc domain or portion thereof; and wherein the third binding domain specifically recognizing a third target molecule.

[0542] Embodiment 138. The immunomodulatory molecule of embodiment 137, wherein the third binding domain and the second binding domain are the same.

[0543] Embodiment 139. The immunomodulatory molecule of embodiment 137, wherein the third binding domain and the second binding domain are different.

[0544] Embodiment 140. The immunomodulatory molecule of any one of embodiments 137-139, wherein the third target molecule and the second target molecule are the same.

[0545] Embodiment 141. The immunomodulatory molecule of embodiment 137 or 139, wherein the third target molecule and the second target molecule are different.

[0546] Embodiment 142. The immunomodulatory molecule of any one of embodiments 131-141, comprising: i) a first antigen-binding polypeptide comprising from N-terminus to C-terminus: a p35 subunit and a p40 subunit of an IL-12 or variant thereof fused in tandem, a first VH, an optional first CH1, a first hinge region, and a first subunit of an Fc domain or portion thereof; ii) a second antigen-binding polypeptide comprising from N-terminus to C-terminus: a second VH, an optional second CH1, a second hinge region, and a second subunit of the Fc domain or portion thereof; iii) a third antigen-binding polypeptide comprising from N-terminus to C-terminus: a first VL, and an optional first CL; and iv) a fourth antigen-binding polypeptide comprising from N-terminus to C-terminus: a second VL, and an optional second CL, wherein the first VH and the first VL and optionally the first CH1 and the first CL form the second binding domain which is an agonist antigen-binding fragment specifically recognizing PD-1, and wherein the second VH and the second VL and optionally the second CH1 and the second CL form a third binding domain specifically recognizing a third target molecule.

[0547] Embodiment 143. The immunomodulatory molecule of embodiment 142, wherein the third binding domain is an agonist antigen-binding fragment specifically recognizing PD-1.

[0548] Embodiment 144. The immunomodulatory molecule of any one of embodiments 131-141, comprising: i) a first antigen-binding polypeptide comprising from N-terminus to C-terminus: a p35 subunit and a p40 subunit of an IL-12 or variant thereof fused in tandem, a first PD-L2 or PD-L1 or variant thereof, a second PD-L2 or PD-L1 or variant thereof, a first hinge region, and a first subunit of an Fc domain or portion thereof; and ii) a second antigen-binding polypeptide comprising from N-terminus to C-terminus: a third PD-L2 or PD-L1 or variant thereof, a fourth PD-L2 or PD-L1 or variant thereof, a second hinge region, and a second subunit of the Fc domain or portion thereof.

[0549] Embodiment 145. The immunomodulatory molecule of any one of embodiments 131-141, comprising: i) a first antigen-binding polypeptide comprising from N-terminus to C-terminus: a p35 subunit and a p40 subunit of an IL-12 or variant thereof fused in tandem, a first PD-L2 or PD-L1 or variant thereof, a second PD-L2 or PD-L1 or variant thereof, a first hinge region, and a first subunit of an Fc domain or portion thereof; ii) a second antigen-binding polypeptide comprising from N-terminus to C-terminus: a VH, an optional CH1, a second hinge region, and a second subunit of the Fc domain or portion thereof; and iii) a third antigen-binding polypeptide comprising from N-terminus to C-terminus: a VL, and an optional CL, wherein the VH and the VL and optionally the CH1 and the CL form a third binding domain specifically recognizing a third target molecule.

[0550] Embodiment 146. The immunomodulatory molecule of embodiment 145, wherein the third binding domain is an agonist antigen-binding fragment specifically recognizing PD-1.

[0551] Embodiment 147. The immunomodulatory molecule of any one of embodiments 131-141, comprising: i) a first antigen-binding polypeptide comprising from N-terminus to C-terminus: a p35 subunit and a p40 subunit of an IL-12 or variant thereof fused in tandem, a VH, an optional CH1, a first hinge region, and a first subunit of an Fc domain or portion thereof; ii) a second antigen-binding polypeptide comprising from N-terminus to C-terminus: a first PD-L2 or PD-L1 or variant thereof, a second PD-L2 or PD-L1 or variant thereof, a second hinge region, and a second subunit of the Fc domain or portion thereof; and iii) a third antigen-binding polypeptide comprising from N-terminus to C-terminus: a VL, and an optional CL, wherein the VH and the VL and optionally the CH1 and the CL form the second binding domain which is an agonist antigen-binding fragment specifically recognizing PD-1.

[0552] Embodiment 148. The immunomodulatory molecule of any one of embodiments 1-72, comprising: i) a first antigen-binding polypeptide comprising from N-terminus to C-terminus: a first VH, an optional first CH1, a first hinge region, and a first subunit of an Fc domain or portion thereof; ii) a second antigen-binding polypeptide comprising from N-terminus to C-terminus: a second VH, an optional second CH1, a second hinge region, and a second subunit of the Fc domain or portion thereof; iii) a third antigen-binding polypeptide comprising from N-terminus to C-terminus: a p35 subunit and a p40 subunit of an IL-12 or variant thereof fused in tandem, a first VL, and an optional first CL; and iv) a fourth antigen-binding polypeptide comprising from N-terminus to C-terminus: a second VL, and an optional second CL, wherein the first VH and the first VL and optionally the first CH1 and the first CL form the second binding domain which is an agonist antigen-binding fragment specifically recognizing PD-1, and wherein the second VH and the second VL and optionally the second CH1 and the second CL form a third binding domain specifically recognizing a third target molecule.

[0553] Embodiment 149. The immunomodulatory molecule of embodiment 148, wherein the third binding domain is an agonist antigen-binding fragment specifically recognizing PD-1.

[0554] Embodiment 150. The immunomodulatory molecule of any one of embodiments 1-72, comprising: i) a first antigen-binding polypeptide comprising from N-terminus to C-terminus: a VH, an optional CH1, a first hinge region, and a first subunit of an Fc domain or portion thereof; ii) a second antigen-binding polypeptide comprising from N-terminus to C-terminus: a first PD-L2 or PD-L1 or variant thereof, a second PD-L2 or PD-L1 or variant thereof, a second hinge region, and a second subunit of the Fc domain or portion thereof; and iii) a third antigen-binding polypeptide comprising from N-terminus to C-terminus: a p35 subunit and a p40 subunit of an IL-12 or variant thereof fused in tandem, a VL, and an optional CL, wherein the VH and the VL and optionally the CH1 and the CL form the second binding domain which is an agonist antigen-binding fragment specifically recognizing PD-1.

[0555] Embodiment 151. The immunomodulatory molecule of any one of embodiments 1-72, wherein the immunomodulatory molecule comprises an antigen-binding protein comprising a first antigen-binding polypeptide and a second antigen-binding polypeptide, wherein the first antigen-binding polypeptide comprises from N-terminus to C-terminus: the second antigen binding domain or portion thereof, a first hinge domain, and a first subunit of an Fc domain or portion thereof; wherein the second antigen-binding polypeptide comprises from N-terminus to C-terminus: the first antigen binding domain or portion thereof, a second hinge domain, and a second subunit of the Fc domain or portion thereof.

[0556] Embodiment 152. The immunomodulatory molecule of embodiment 151, wherein the second binding domain is an agonist Fab or an agonist scFv that specifically recognizes an inhibitory checkpoint molecule.

[0557] Embodiment 153. The immunomodulatory molecule of embodiment 151, wherein the second binding domain is an agonist ligand or variant thereof of an inhibitory checkpoint molecule.

[0558] Embodiment 154. The immunomodulatory molecule of embodiment 153, wherein the second binding domain is PD-L1 or PD-L2 or variant thereof.

[0559] Embodiment 155. The immunomodulatory molecule of any one of embodiments 151-154, wherein the first binding domain is an immunostimulatory cytokine or variant thereof.

[0560] Embodiment 156. The immunomodulatory molecule of embodiment 155, wherein the immunostimulatory cytokine or variant thereof is IL-2 or IL-12 or variant thereof.

[0561] Embodiment 157. The immunomodulatory molecule of any one of embodiments 151-156, comprising: i) a first antigen-binding polypeptide comprising from N-terminus to C-terminus: a VH, an optional CH1, a first hinge region, and a first subunit of an Fc domain or portion thereof; ii) a second antigen-binding polypeptide comprising from N-terminus to C-terminus: a p35 subunit and a p40 subunit of an IL-12 or variant thereof fused in tandem, a second hinge region, and a second subunit of the Fc domain or portion thereof; and iii) a third antigen-binding polypeptide comprising from N-terminus to C-terminus: a VL, and an optional CL, wherein the VH and the VL and optionally the CH1 and the CL form the second binding domain which is an agonist antigen-binding fragment specifically recognizing PD-1.

[0562] Embodiment 158. The immunomodulatory molecule of any one of embodiments 151-156, comprising: i) a first antigen-binding polypeptide comprising from N-terminus to C-terminus: a first PD-L2 or PD-L1 or variant thereof, a second PD-L2 or PD-L1 or variant thereof, a first hinge region, and a first subunit of an Fc domain or portion thereof; and ii) a second antigen-binding polypeptide comprising from N-terminus to C-terminus: a p35 subunit and a p40 subunit of an IL-12 or variant thereof fused in tandem, a second hinge region, and a second subunit of the Fc domain or portion thereof.

[0563] Embodiment 159. The immunomodulatory molecule of any one of embodiments 1-72, wherein the immunomodulatory molecule comprises an antigen-binding protein comprising an antigen-binding polypeptide, wherein the antigen-binding polypeptide comprises from N-terminus to C-terminus: the second binding domain or portion thereof, an optional hinge region, an Fc domain subunit or portion thereof, and the first binding domain or portion thereof.

[0564] Embodiment 160. The immunomodulatory molecule of embodiment 159, wherein the second binding domain is an agonist Fab or an agonist scFv that specifically recognizes an inhibitory checkpoint molecule.

[0565] Embodiment 161. The immunomodulatory molecule of embodiment 159, wherein the second binding domain is an agonist ligand or variant thereof of an inhibitory checkpoint molecule.

[0566] Embodiment 162. The immunomodulatory molecule of embodiment 161, wherein the second binding domain is PD-L1 or PD-L2 or variant thereof.

[0567] Embodiment 163. The immunomodulatory molecule of any one of embodiments 159-162, wherein the first binding domain is an immunostimulatory cytokine or variant thereof.

[0568] Embodiment 164. The immunomodulatory molecule of embodiment 163, wherein the immunostimulatory cytokine or variant thereof is IL-2 or IL-12 or variant thereof.

[0569] Embodiment 165. The immunomodulatory molecule of embodiment 163 or 164, wherein the immunostimulatory cytokine or variant thereof is a monomeric immunostimulatory cytokine or variant thereof.

[0570] Embodiment 166. The immunomodulatory molecule of embodiment 163 or 164, wherein the immunostimulatory cytokine or variant thereof is a dimeric immunostimulatory cytokine or variant thereof.

[0571] Embodiment 167. The immunomodulatory molecule of embodiment 166, wherein both subunits of the dimeric immunostimulatory cytokine or variant thereof are positioned in tandem at the C-terminus of the antigen-binding polypeptide.

[0572] Embodiment 168. The immunomodulatory molecule of embodiment 166, wherein the antigen-binding protein comprises two antigen-binding polypeptides each comprising a hinge region and an Fc domain subunit or portion thereof, wherein one subunit of the dimeric immunostimulatory cytokine or variant thereof is fused to the C-terminus of the Fc domain subunit or portion thereof of one antigen-binding polypeptide, and wherein the other subunit of the dimeric immunostimulatory cytokine or variant thereof is fused to the C-terminus of the Fc domain subunit or portion thereof of the other antigen-binding polypeptide.

[0573] Embodiment 169. The immunomodulatory molecule of embodiment 168, wherein the antigen-binding polypeptide not comprising the second binding domain or portion thereof comprises from N-terminus to C-terminus: a third binding domain or portion thereof specifically recognizing a third target molecule, the hinge region, the subunit of the Fc domain or portion thereof, and the subunit of the dimeric immunostimulatory cytokine or variant thereof.

[0574] Embodiment 170. The immunomodulatory molecule of any one of embodiments 159-168, wherein the antigen-binding protein comprises a first antigen-binding polypeptide and a second antigen-binding polypeptide, wherein the first antigen-binding polypeptide comprises from N-terminus to C-terminus: the second binding domain or portion thereof, a first hinge region, a first subunit of an Fc domain or portion thereof, and the first binding domain or portion thereof; wherein the second antigen-binding polypeptide comprises from N′ to C′: a third binding domain or portion thereof specifically recognizing a third target molecule, a second hinge region, and a second subunit of the Fc domain or portion thereof.

[0575] Embodiment 171. The immunomodulatory molecule of embodiment 169 or 170, wherein the third binding domain and the second binding domain are the same.

[0576] Embodiment 172. The immunomodulatory molecule of embodiment 169 or 170, wherein the third binding domain and the second binding domain are different.

[0577] Embodiment 173. The immunomodulatory molecule of any one of embodiments 169-172, wherein the third target molecule and the second target molecule are the same.

[0578] Embodiment 174. The immunomodulatory molecule of any one of embodiments 169, 170, and 172, wherein the third target molecule and the second target molecule are different.

[0579] Embodiment 175. The immunomodulatory molecule of any one of embodiments 159-174, comprising: i) a first antigen-binding polypeptide comprising from N-terminus to C-terminus: a first PD-L2 or PD-L1 or variant thereof, a first hinge region, a first subunit of an Fc domain or portion thereof, and a p35 subunit and a p40 subunit of an IL-12 or variant thereof fused in tandem; and ii) a second antigen-binding polypeptide comprising from N-terminus to C-terminus: a second PD-L2 or PD-L1 or variant thereof, a second hinge region, and a second subunit of the Fc domain or portion thereof.

[0580] Embodiment 176. The immunomodulatory molecule of any one of embodiments 159-174, comprising: i) a first antigen-binding polypeptide comprising from N-terminus to C-terminus: a first VH, an optional first CH1, a first hinge region, a first subunit of an Fc domain or portion thereof, and a p35 subunit and a p40 subunit of an IL-12 or variant thereof fused in tandem; ii) a second antigen-binding polypeptide comprising from N-terminus to C-terminus: a second VH, an optional second CH1, a second hinge region, and a second subunit of the Fc domain or portion thereof; iii) a third antigen-binding polypeptide comprising from N-terminus to C-terminus: a first VL, and an optional first CL; and iv) a fourth antigen-binding polypeptide comprising from N-terminus to C-terminus: a second VL, and an optional second CL, wherein the first VH and the first VL and optionally the first CH1 and the first CL form the second binding domain which is an agonist antigen-binding fragment specifically recognizing PD-1, and wherein the second VH and the second VL and optionally the second CH1 and the second CL form a third binding domain specifically recognizing a third target molecule.

[0581] Embodiment 177. The immunomodulatory molecule of embodiment 176, wherein the third binding domain is an agonist antigen-binding fragment specifically recognizing PD-1.

[0582] Embodiment 178. The immunomodulatory molecule of any one of embodiments 159-174, comprising: i) a first antigen-binding polypeptide comprising from N-terminus to C-terminus: a VH, an optional CH1, a first hinge region, a first subunit of an Fc domain or portion thereof, and a p35 subunit and a p40 subunit of an IL-12 or variant thereof fused in tandem; ii) a second antigen-binding polypeptide comprising from N-terminus to C-terminus: a first PD-L2 or PD-L1 or variant thereof, a second PD-L2 or PD-L1 or variant thereof, a second hinge region, and a second subunit of the Fc domain or portion thereof; and iii) a third antigen-binding polypeptide comprising from N-terminus to C-terminus: a VL, and an optional CL, wherein the VH and the VL and optionally the CH1 and the CL form the second binding domain which is an agonist antigen-binding fragment specifically recognizing PD-1.

[0583] Embodiment 179. The immunomodulatory molecule of any one of embodiments 159-174, comprising: i) a first antigen-binding polypeptide comprising from N-terminus to C-terminus: a first PD-L2 or PD-L1 or variant thereof, a first hinge region, a first subunit of an Fc domain or portion thereof, and a p35 subunit or a p40 subunit of an IL-12 or variant thereof; and ii) a second antigen-binding polypeptide comprising from N-terminus to C-terminus: a second PD-L2 or PD-L1 or variant thereof, a second hinge region, and a second subunit of the Fc domain or portion thereof, and a p40 subunit or a p35 subunit of an IL-12 or variant thereof.

[0584] Embodiment 180. The immunomodulatory molecule of any one of embodiments 159-174, comprising: i) a first antigen-binding polypeptide comprising from N-terminus to C-terminus: a first VH, an optional first CH1, a first hinge region, a first subunit of an Fc domain or portion thereof, and a p35 subunit or a p40 subunit of an IL-12 or variant thereof; ii) a second antigen-binding polypeptide comprising from N-terminus to C-terminus: a second VH, an optional second CH1, a second hinge region, a second subunit of the Fc domain or portion thereof, and a p40 subunit or a p35 subunit of an IL-12 or variant thereof; iii) a third antigen-binding polypeptide comprising from N-terminus to C-terminus: a first VL, and an optional first CL; and iv) a fourth antigen-binding polypeptide comprising from N-terminus to C-terminus: a second VL, and an optional second CL, wherein the first VH and the first VL and optionally the first CH1 and the first CL form the second binding domain which is an agonist antigen-binding fragment specifically recognizing PD-1, and wherein the second VH and the second VL and optionally the second CH1 and the second CL form a third binding domain specifically recognizing a third target molecule.

[0585] Embodiment 181. The immunomodulatory molecule of embodiment 180, wherein the third binding domain is an agonist antigen-binding fragment specifically recognizing PD-1.

[0586] Embodiment 182. The immunomodulatory molecule of any one of embodiments 1-72, wherein the immunomodulatory molecule comprises an antigen-binding protein comprising a first antigen-binding polypeptide and a second antigen-binding polypeptide, wherein the first antigen-binding polypeptide comprises from N-terminus to C-terminus: a VH, a CH1, an optional hinge region, an Fc domain subunit or portion thereof; wherein the second antigen-binding polypeptide comprises from N-terminus to C-terminus: a VL, a CL, and the first binding domain or portion thereof; and wherein the VH and the VL and optionally the CH1 and the CL form the second binding domain.

[0587] Embodiment 183. The immunomodulatory molecule of embodiment 182, wherein the first antigen-binding polypeptide comprises from N-terminus to C-terminus: a VH, a CH1, a first hinge region, a first subunit of an Fc domain or portion thereof; wherein the antigen-binding protein further comprises a third antigen-binding polypeptide comprising from N-terminus to C-terminus: a third binding domain or portion thereof specifically recognizing a third target molecule, a second hinge region, and a second subunit of the Fc domain or portion thereof.

[0588] Embodiment 184. The immunomodulatory molecule of embodiment 183, wherein the third binding domain and the second binding domain are the same.

[0589] Embodiment 185. The immunomodulatory molecule of embodiment 183, wherein the third binding domain and the second binding domain are different.

[0590] Embodiment 186. The immunomodulatory molecule of any one of embodiments 183-185, wherein the third target molecule and the second target molecule are the same.

[0591] Embodiment 187. The immunomodulatory molecule of embodiment 183 or 185, wherein the third target molecule and the second target molecule are different.

[0592] Embodiment 188. The immunomodulatory molecule of any one of embodiments 183-187, wherein the immunomodulatory molecule comprises an antigen-binding protein comprising four antigen-binding polypeptides, wherein the first antigen-binding polypeptide comprises from N-terminus to C-terminus: a first VH, a first CH1, a first hinge region, a first subunit of an Fc domain or portion thereof; wherein the second antigen-binding polypeptide comprises from N-terminus to C-terminus: a first VL, a first CL, and the first binding domain or portion thereof; wherein the third antigen-binding polypeptide comprising from N-terminus to C-terminus: a second VH, a second CH1, a second hinge region, and a second subunit of the Fc domain or portion thereof; wherein the fourth antigen-binding polypeptide comprises from N-terminus to C-terminus: a second VL, and a second CL; wherein the first VH and the first VL and the first CH1 and the first CL form the second binding domain; and wherein the second VH and the second VL and the second CH1 and the second CL form a third binding domain specifically recognizing a third target molecule.

[0593] Embodiment 189. The immunomodulatory molecule of any one of embodiments 182-188, wherein the first binding domain is an immunostimulatory cytokine or variant thereof.

[0594] Embodiment 190. The immunomodulatory molecule of embodiment 189, wherein the immunostimulatory cytokine or variant thereof is IL-2 or IL-12 or variant thereof.

[0595] Embodiment 191. The immunomodulatory molecule of embodiment 189 or 190, wherein the immunostimulatory cytokine or variant thereof is a monomeric immunostimulatory cytokine or variant thereof.

[0596] Embodiment 192. The immunomodulatory molecule of embodiment 189 or 190, wherein the immunostimulatory cytokine or variant thereof is a dimeric immunostimulatory cytokine or variant thereof.

[0597] Embodiment 193. The immunomodulatory molecule of embodiment 192, wherein both subunits of the dimeric immunostimulatory cytokine or variant thereof are positioned in tandem at the C-terminus of the second antigen-binding polypeptide and/or the fourth antigen-binding polypeptide.

[0598] Embodiment 194. The immunomodulatory molecule of embodiment 192, wherein one subunit of the dimeric immunostimulatory cytokine or variant thereof is fused to the C-terminus of the first CL of the second antigen-binding polypeptide, and wherein the other subunit of the dimeric immunostimulatory cytokine or variant thereof is fused to the second CL of the fourth antigen-binding polypeptide.

[0599] Embodiment 195. The immunomodulatory molecule of any one of embodiments 182-194, comprising: i) a first antigen-binding polypeptide comprising from N-terminus to C-terminus: a first VH, a first CH1, a first hinge region, and a first subunit of an Fc domain or portion thereof; ii) a second antigen-binding polypeptide comprising from N-terminus to C-terminus: a first VL, a first CL, and a p35 subunit and a p40 subunit of an IL-12 or variant thereof fused in tandem; iii) a third antigen-binding polypeptide comprising from N-terminus to C-terminus: a second VH, a second CH1, a second hinge region, and a second subunit of the Fc domain or portion thereof; and iv) a fourth antigen-binding polypeptide comprising from N-terminus to C-terminus: a second VL, a second CL, and a p35 subunit and a p40 subunit of an IL-12 or variant thereof fused in tandem; wherein the first VH and the first VL and the first CH1 and the first CL form the second binding domain which is an agonist antigen-binding fragment specifically recognizing PD-1, and wherein the second VH and the second VL and the second CH1 and the second CL form a third binding domain specifically recognizing a third target molecule.

[0600] Embodiment 196. The immunomodulatory molecule of embodiment 195, wherein the third binding domain is an agonist antigen-binding fragment specifically recognizing PD-1.

[0601] Embodiment 197. An isolated nucleic acid encoding the immunomodulatory molecule of any one of embodiments 1-196.

[0602] Embodiment 198. A vector comprising the nucleic acid of embodiment 197.

[0603] Embodiment 199. An isolated host cell comprising the nucleic acid of embodiment 197 or the vector of embodiment 198.

[0604] Embodiment 200. The host cell of embodiment 199, which is a Chinese hamster ovary (CHO) cell.

[0605] Embodiment 201. A method of producing an immunomodulatory molecule, comprising: (a) culturing a host cell comprising the nucleic acid of embodiment 197 or the vector of embodiment 198, or a host cell of embodiment 199 or 200, under a condition effective to express the encoded immunomodulatory molecule; and (b) obtaining the expressed immunomodulatory molecule from said host cell.

[0606] Embodiment 202. A pharmaceutical composition comprising the immunomodulatory molecule of any one of embodiments 1-196, and optionally a pharmaceutical acceptable carrier.

[0607] Embodiment 203. A method of treating a disease or disorder in an individual, comprising administering to the individual an effective amount of the immunomodulatory molecule of any one of embodiments 1-196, or the pharmaceutical composition of embodiment 202.

[0608] Embodiment 204. The method of embodiment 203, wherein the immunomodulatory molecule or pharmaceutical composition is administered intravenously or subcutaneously.

[0609] Embodiment 205. The method of embodiment 203 or 204, wherein the immunomodulatory molecule or pharmaceutical composition is administered in an amount of about 1 μg/kg to about 10 mg/kg.

[0610] Embodiment 206. The method of any one of embodiments 203-205, wherein the immunomodulatory molecule or pharmaceutical composition is administered once every three weeks.

[0611] Embodiment 207. The method of any one of embodiments 203-206, wherein the disease or disorder is a cancer.

[0612] Embodiment 208. The method of embodiment 207, wherein the cancer is selected from the group consisting of lung cancer, liver cancer, renal cancer, colorectal cancer, ovarian cancer, breast cancer, pancreatic cancer, gastric carcinoma, bile duct cancer, squamous cell carcinoma, bladder cancer, esophageal cancer, mesothelioma, melanoma, head and neck cancer, thyroid cancer, sarcoma, prostate cancer, glioblastoma, cervical cancer, thymic carcinoma, leukemia, lymphoma, myeloma, mycoses fungoides, and merkel cell cancer.

[0613] Embodiment 209. The method of any one of embodiments 203-206, wherein the disease or disorder is an infection, an autoimmune disease, an allergy, a graft rejection, or a graft-versus-host disease (GvHD).

### EXAMPLES

[0614] The examples below are intended to be purely exemplary of the invention and should therefore not be considered to limit the invention in any way. The following examples and detailed description are offered by way of illustration and not by way of limitation.

### Example 1: In Vitro Analysis of IL-12 Biological Activities in IL-12/PD-L1-Fc, PD-L1-Fc/IL-12, IL-12/Anti-PD-1, CTLA-4-Fc/IL-12, and IL-12/CTLA-4-Fc Immunomodulatory Molecules

### Construction of IL-12/PD-L1-Fc, PD-L1-Fc/IL-12, IL-12/Anti-PD-1, CTLA-4-Fc/IL-12, and IL-12/CTLA-4-Fc Immunomodulatory Molecules

[0615] IL-12 is a heterodimeric cytokine composed of covalently linked p35 and p40 subunits. IL-12 variants comprising amino acid substitution in the p40 subunit were constructed by replacing amino acids from position 56 to 65 of the p40 subunit with Alanine or Serine (see Table 1), and a single chain IL-12 variant was made, from N′ to C′: p40 variant subunit-linker (SEQ ID NO: 228)-p35 wildtype subunit (SEQ ID NO: 61). A single chain “wildtype” IL-12 was also constructed as a control (SEQ ID NO: 67), from N′ to C′: p40 wildtype subunit (SEQ ID NO: 62)-linker (SEQ ID NO: 228)-p35 wildtype subunit, referred to as “WT” in Table 1. The linker can also be changed to SEQ ID NO: 226, and the single chain “wildtype” IL-12 can also comprise SEQ ID NO: 253.

### IL-12/Anti-PD-1 (Hinge) Immunomodulatory Molecules

[0616] An anti-human PD-1 antibody comprising nivolumab (Opdivo®) VH (SEQ ID NO: 48) and VL (SEQ ID NO: 49) sequences was used as the parental full-length antibody, comprising two light chains each comprising the amino acid sequence of SEQ ID NO: 50. To construct heterodimer, one heavy chain comprises a hinge region comprising SEQ ID NO: 78, and an Fc domain subunit comprising SEQ ID NO: 97; the other heavy chain comprises a hinge region comprising SEQ ID NO: 77, and an Fc domain subunit comprising SEQ ID NO; 98. Various single chain IL-12 variants (or single chain “wildtype” IL-12 control) were positioned within the hinge region of a heavy chain of the anti-PD-1 antibody (see FIG. 1C for exemplary structure, anti-PD-1 nivolumab is antagonist antibody), to construct IL-12/anti-PD-1 immunomodulatory molecule “Fab-IL-12-Fc-PD-1 Ab.” For example, Fab-IL-12(E59A/F60A)-Fc-PD-1 Ab immunomodulatory molecule (or “IL-12(E59A/F60A)/anti-PD-1 immunomodulatory molecule”, “IW-#48”, or “construct #48”) comprising a single-chain IL-12 variant IL-12B (p40 E59A/F60A)-linker-IL-12A (wt p35) positioned at the hinge region comprises two light chains each comprising the amino acid sequence of SEQ ID NO: 50, one heavy chain comprising the amino acid sequence of SEQ ID NO: 21, and one heavy chain with the single-chain IL-12(E59A/F60A) variant (SEQ ID NO: 68) positioned at the hinge region comprising the amino acid sequence of SEQ ID NO: 22. IL-12(G64A)/anti-PD-1 immunomodulatory molecule (“construct #47”, or “IW-#47”) comprising a single-chain IL-12 variant IL-12B (p40 G64A)-linker-IL-12A (wt p35) positioned at the hinge region comprises two light chains each comprising the amino acid sequence of SEQ ID NO: 50, one heavy chain comprising the amino acid sequence of SEQ ID NO: 21, and one heavy chain with the single-chain IL-12(G64A) variant (SEQ ID NO: 70) positioned at the hinge region. IL-12(E59A)/anti-PD-1 immunomodulatory molecule comprising a single-chain IL-12 variant IL-12B (p40 E59A)-linker-IL-12A (wt p35) positioned at the hinge region comprises two light chains each comprising the amino acid sequence of SEQ ID NO: 50, one heavy chain comprising the amino acid sequence of SEQ ID NO: 21, and one heavy chain with the single-chain IL-12(E59A) variant (SEQ ID NO: 69) positioned at the hinge region. IL-12(F60A)/anti-PD-1 immunomodulatory molecule (“construct #46”, or “IW-#46”) comprising a single-chain IL-12 variant IL-12B (p40 F60A)-linker-IL-12A (wt p35) positioned at the hinge region comprises two light chains each comprising the amino acid sequence of SEQ ID NO: 50, one heavy chain comprising the amino acid sequence of SEQ ID NO: 21, and one heavy chain with the single-chain IL-12(F60A) variant (SEQ ID NO: 71) positioned at the hinge region comprising the amino acid sequence of SEQ ID NO: 23. The heavy chain comprising the amino acid sequence of SEQ ID NO: 21 can also be replaced with a heavy chain comprising the amino acid sequence of SEQ ID NO: 51. The linker within the single-chain IL-12 variant (e.g., single-chain IL-12(E59A/F60A) variant) can also be changed to SEQ ID NO: 246, and the single-chain IL-12(E59A/F60A) variant can comprise SEQ ID NO: 254.

### IL-12/PD-L1-Fc (Hinge) and PD-L1-Fc/IL-12 (C-Terminal) Immunomodulatory Molecules

[0617] A PD-L1-hinge-Fc fusion protein (two PD-L1 extracellular domain-hinge-Fc polypeptides) was used as parental antigen-binding protein to construct immunomodulatory molecules that bind to PD-1. To construct heterodimeric PD-L1-hinge-Fc fusion protein, one PD-L1-hinge-Fc fusion polypeptide comprises a hinge region comprising SEQ ID NO: 88, and an Fc domain subunit comprising SEQ ID NO: 97; the other PD-L2-Fc fusion polypeptide comprises a hinge region comprising SEQ ID NO: 87, and an Fc domain subunit comprising SEQ ID NO: 98. Single chain IL-12 variant described above was either positioned at the hinge region of one PD-L1-hinge-Fc polypeptide (hereinafter referred to as “IL-12/PD-L1-Fc immunomodulatory molecule”), or fused to the C-terminus of one PD-L1-hinge-Fc polypeptide (hereinafter referred to as “PD-L1-Fc/IL-12 immunomodulatory molecule”).

[0618] For example, IL-12(E59A/F60A)/PD-L1(wt)-Fc immunomodulatory molecule comprises one IL-12 fusion polypeptide from N′ to C′: PD-L1(wt) extracellular domain (SEQ ID NO: 121)-GGGGSGGG linker (SEQ ID NO: 244)-single chain IL-12(E59A/F60A) variant-GGGGSGGG linker (SEQ ID NO: 244)-hinge (SEQ ID NO: 88)-Fc domain subunit (SEQ ID NO: 97); and one pairing polypeptide from N′ to C′: PD-L1(wt) extracellular domain (SEQ ID NO: 121)-GGGGSGGG linker (SEQ ID NO: 244)-hinge (SEQ ID NO: 87)-Fc domain subunit (SEQ ID NO: 98). IL-12(E59A/F60A)/PD-L1(mut)-Fc immunomodulatory molecule comprises one IL-12 fusion polypeptide from N′ to C′: PD-L1(mut) extracellular domain (e.g., SEQ ID NO: 129)-GGGGSGGG linker (SEQ ID NO: 244)-single chain IL-12(E59A/F60A) variant-GGGGSGGG linker (SEQ ID NO: 244)-hinge (SEQ ID NO: 88)-Fc domain subunit (SEQ ID NO: 97); and one pairing polypeptide from N′ to C′: PD-L1(mut) extracellular domain-GGGGSGGG linker (SEQ ID NO: 244)-hinge (SEQ ID NO: 87)-Fc domain subunit (SEQ ID NO: 98). PD-L1(wt)-Fc/IL-12(E59A/F60A) (C-terminal) immunomodulatory molecule comprises one IL-12 fusion polypeptide comprising from N′ to C′: PD-L1 (wt) extracellular domain (SEQ ID NO: 121)-GSG linker (SEQ ID NO: 203)-hinge (SEQ ID NO: 88)-Fc domain subunit (SEQ ID NO: 97)-GGGGSGGGGSGGGGS linker (SEQ ID NO: 229)-single chain IL-12(E59A/F60A) variant (SEQ ID NO: 68 or 254); and one pairing polypeptide comprising from N′ to C′: PD-L1 (wt) extracellular domain (SEQ ID NO: 121)-GSG linker (SEQ ID NO: 203)-hinge (SEQ ID NO: 87)-Fc domain subunit (SEQ ID NO: 98)). The linkers can be changed to other linkers (e.g., GSG linker; SEQ ID NO: 203) or can be optional.

[0619] IL-12/CTLA-4-Fc (hinge) and CTLA-4-Fc/IL-12 (C-terminal) immunomodulatory molecules were similarly constructed. See Table 2 for sequences.

[0620] Nucleic acids encoding various formats of IL-12/PD-L1-Fc, IL-12/anti-PD-1, and IL-12/CTLA-4-Fc immunomodulatory molecules were chemically synthesized (see Table 2 for amino acid sequences of each polypeptide chain), cloned into a lentiviral vector, and transfected into CHO cells for expression. Expressed immunomodulatory molecules were collected from supernatant, purified by protein A chromatography, and verified on SDS-PAGE for purity.

### IL-12 Signal Transduction Assay

[0621] HEK-Blue™ IL-12 Cells (InvivoGen Cat. #hkb-il12) and HEK-PD-1-IL-12 cells (generated in-house by overexpressing human PD-1 in HEK-Blue™ IL-12 Cells using a lentiviral vector) were used to assess IL-12 signal activation activity of the various IL-12 immunomodulatory molecules comprising different IL-12 moieties, following the InvivoGen user manual (InvivoGen Cat. #hkb-il12), hereinafter also referred to as “HEK-IL-12 reporter assay” or “HEK-PD-1-IL-12 reporter assay.” HEK-Blue™ IL-12 reporter cells and HEK-PD-1-IL-12 reporter cells stably express the human IL-12 receptor complex consisting of the IL-12 receptor 01 (IL-12Rβ1) and IL-12Rβ2, along with the human STAT4 gene to obtain a fully functional IL-12 signaling pathway (TyK2/JAK2/STAT4). In addition, these reporter cells also carry a STAT4-inducible SEAP reporter gene. Upon IL-12 stimulation, HEK-Blue™ IL-12 reporter cells and HEK-PD-1-IL-12 reporter cells trigger the activation of STAT4 and the subsequent secretion of SEAP, the levels of which can be monitored using QUANTT-Blue™ (InvivoGen Cat. #rep-qbs) colorimetric enzyme assay for alkaline phosphatase activity.

[0622] Briefly, HEK-Blue™ IL-12 cells were added to various IL-12 containing immunomodulatory molecules in each plate well (or recombinant human IL-12 (rIL-12) in a well as positive control), and incubated at 37° C. in a C02 incubator for 20-24 hours or overnight. After incubation, supernatant was transferred to fresh plate wells, added QUANTI-Blue™ solution, and incubated at 37° C. incubator for 30 minutes-3 hours. Then SEAP levels were determined using a spectrophotometer at 620-655 nm. The activity of recombinant human IL-12 (positive control) in activating IL-12 signaling pathway was measured as 10 unit/ng and served as a reference. Percent IL-12 signal transduction for various IL-12 immunomodulatory molecules was calculated by dividing the immunomodulatory molecules readout by the recombinant human IL-12 readout.

[0623] In HEK-PD-1-IL-12 reporter assay, IL-12/anti-PD-1 immunomodulatory molecules were only able to bind to HEK-IL-12 cells via binding PD-1 or IL-12 moiety/IL-12 receptor interaction. Positioning IL-12 comprising wildtype p40 subunit at the hinge region of the anti-PD-1 antibody (“IL-12(WT)/anti-PD-1”) reduced IL-12 activity to 50.0%, in the absence of PD-1 binding. As can be seen from Table 1, positions 59 and 60 of p40 subunit are crucial for IL-12 biological activity. IL-12/anti-PD-1 immunomodulatory molecule comprising E59A/F60A double mutations in the IL-12 p40 subunit (“IL-12(E59A/F60A)/anti-PD-1”, “IW-#48”) showed almost completely aborted IL-12 activity as measured by IL-12 signal transduction (0.1%).

[0624] In HEK-PD-1-IL-12 reporter assay, IL-12/anti-PD-1 immunomodulatory molecules were able to bind to HEK-PD-1-IL-12 cells via both IL-12 moiety/IL-12 receptor interaction, and anti-PD-1 antigen-binding fragment/PD-1 interaction. As can be seen from Table 1, the biological activity of all IL-12 variants (and “WT” IL-12) in IL-12/anti-PD-1 immunomodulatory molecules increased with the presence of PD-1 binding. Especially, the IL-12 activity of IL-12(E59A/F60A)/anti-PD-1 immunomodulatory molecule (IW-#48) was rescued by PD-1/anti-PD-1 antibody binding to 5.9%, which was 59-fold of that in the absence of PD-1/anti-PD-1 antibody binding (0.1%).

[0625] E59A/F60A double mutations in the IL-12 p40 subunit demonstrated superior effect compared to other mutations in IL-12 p40 subunit. By positioning this IL-12(E59A/F60A) variant at the hinge region of a heavy chain of the anti-PD-1 full-length antibody, the obtained IL-12(E59A/F60A)/anti-PD-1 immunomodulatory molecule (IW-#48) only exhibited IL-12 biological activity in the presence of target antigen (PD-1)-antibody binding, but not in the absence of target antigen (PD-1)-antibody binding, demonstrating targeted specificity.

TABLE 1
IL-12 biological activity of IL-12/anti-PD-1 immunomodulatory
molecules comprising different IL-12 moieties

| | rIL-12 | “WT” | Q56A | V57A | K58A | E59A | F60A |
|---|---|---|---|---|---|---|---|
| HEK-IL-12 cells | 100.0% | 50.0% | 55.0% | 48.0% | 39.0% | 10.0% | 9.0% |
| HEK-PD-1-IL-12 cells | 100.0% | 120.0% | 150.0% | 91.0% | 98.0% | 45.0% | 56.0% |

| | G61A | D62A | A63S | G64A | Q65A | E59A/F60A |
|---|---|---|---|---|---|---|
| HEK-IL-12 cells | 56.0% | 57.0% | 62.0% | 69.0% | 62.0% | 0.1% |
| HEK-PD-1-IL-12 cells | 130.0% | 93.0% | 89.0% | 150.0% | 130.0% | 5.9% |

[0626] In HEK-PD-1-IL-12 reporter assay, IL-12 immunomodulatory molecules were only able to bind to HEK-IL-12 cells via binding PD-1 or IL-12 moiety/IL-12 receptor interaction. The CTLA-4/IL-12 immunomodulatory molecules were unable to bind to the PD-1+ HEK cells, which do not express receptors such as CD80 or CD86. The biological activity of IL-12 in the absence of receptor (CD80 or CD86)-ligand (CTLA-4) binding from these CLTA-4 immunomodulatory molecules (Table 2; SEQ ID NOs: 1-5) was non-existent: 0.2-2.3%. Notably, the single mutant IL-12 (F60A) at the C-terminus without the receptor (CD80 or CD86)-ligand (CTLA-4) binding shown some activity (2.3%) while the single mutant IL-12 (F60A) at the hinge completely lost any activity (0.2%). The wild-type PD-L1 ligand (wt extracellular domain SEQ ID NO: 121) binding to PD-1 is low affinity (K_{d} of ˜8.2 μM). The mutations in PD-L1 ligand (I54Q/Y56F/E58M/R113T/M115L/S117A/G119K; mutant 8 extracellular domain SEQ ID NO: 129) increased binding affinity by about 200 fold (K_{d} of ˜0.041 μM). The wild-type PD-L1 ligand binding to PD-1 from these wild type constructs (Table 2; SEQ ID NOs: 6-10) rescued the biological activity of mutant IL-12 (greater 100%) with the exception of the double mutant IL12 (E59A/F60A) located in the hinge region (8.2%). In contrast, the high affinity PD-L1 ligand from these mutant PD-L1 constructs (Table 2; SEQ ID NOs: 11-15) rescued all of the biological activity of mutant IL-12 including in the mutant IL-12(E59A/F60A) location at the hinge (125.6%). These data suggested that the activity of the mutant IL-12 (E59A/F60A) could be rescued by increasing the binding affinity of the PD-L1 ligand in the same construct. The rescue of biological activity depends on the affinity of PD-L1 ligand to PD-1. Furthermore, the activity of IL-12 in the presence of PD-L1/PD-1 and IL-12/IL-12R binding was greater than the positive control (rIL-12 alone). This indicates that the presence of a second domain binding to the target cell (e.g., PD-L1/PD-1 binding on T cell) facilitates IL-12 immunomodulatory molecules binding to the same target cell (e.g., IL-12/IL-12R binding on T cell).

TABLE 2
IL-12 biological activity of various IL-12 immunomodulatory molecules

| Second | Second | First binding | | IL-12B | Biological | |
|---|---|---|---|---|---|---|
| binding | binding | domain (IL- | | subunit | activity of | Construct |
| domain | domain | 12) location | Structure | mutations | IL-12 | sequences |
| CTLA-4 | Wildtype | C-terminus of | FIG. 1I | E59A/F60A | 0.6% | 1^{st} polypeptide chain SEQ |
| extracellular | | heavy chain | | | | ID NO: 1; 2^{nd} polypeptide |
| domain | | | | | | chain SEQ ID NO: 2 |
| (SEQ ID | | | | F60A | 2.3% | 1^{st} polypeptide chain SEQ |
| NO: 141) | | | | | | ID NO: 1; 2^{nd} polypeptide |
| | | | | | | chain SEQ ID NO: 3 |
| | | Hinge | FIG. 1G | E59A/F60A | 0.3% | 1^{st} polypeptide chain SEQ |
| | | | | | | ID NO: 1; 2^{nd} polypeptide |
| | | | | | | chain SEQ ID NO: 4 |
| | | | | F60A | 0.2% | 1^{st} polypeptide chain SEQ |
| | | | | | | ID NO: 1; 2^{nd} polypeptide |
| | | | | | | chain SEQ ID NO: 5 |
| PD-L1 | I54Q/Y56F/ | C-terminus | FIG. 1I | E59A/F60A | 189.0% | 1^{st} polypeptide chain SEQ |
| extracellular | E58M/ | of Fc | | | | ID NO: 11; 2^{nd} polypeptide |
| domain | R113T/ | | | | | chain SEQ ID NO: 12 |
| (high affinity) | M115L/ | | | F60A | 234.1% | 1^{st} polypeptide chain SEQ |
| (SEQ ID | S117A/ | | | | | ID NO: 11; 2^{nd} polypeptide |
| NO: 129) | G119K | | | | | chain SEQ ID NO: 13 |
| | | Hinge | FIG. 1G | E59A/F60A | 125.6% | 1^{st} polypeptide chain SEQ |
| | | | | | | ID NO: 11; 2^{nd} polypeptide |
| | | | | | | chain SEQ ID NO: 14 |
| | | | | F60A | 233.5% | 1^{st} polypeptide chain SEQ |
| | | | | | | ID NO: 11; 2^{nd} polypeptide |
| | | | | | | chain SEQ ID NO: 15 |
| PD-L1 | Wildtype | C-terminus of | FIG. 1I | E59A/F60A | 200.2% | 1^{st} polypeptide chain SEQ |
| extracellular | | Fc | | | | ID NO: 6; 2^{nd} polypeptide |
| domain | | | | | | chain SEQ ID NO: 7 |
| (low affinity) | | | | F60A | 227.5% | 1^{st} polypeptide chain SEQ |
| (SEQ ID | | | | | | ID NO: 6; 2^{nd} polypeptide |
| NO: 121) | | | | | | chain SEQ ID NO: 8 |
| | | Hinge | FIG. 1G | E59A/F60A | 8.2% | 1^{st} polypeptide chain SEQ |
| | | | | | | ID NO: 6; 2^{nd} polypeptide |
| | | | | | | chain SEQ ID NO: 9 |
| | | | | F60A | 221.0% | 1^{st} polypeptide chain SEQ |
| | | | | | | ID NO: 6; 2^{nd} polypeptide |
| | | | | | | chain SEQ ID NO: 10 |

### Example 2: In Vivo Efficacy of IL-12/PD-L2-Fc and PD-L2-Fc/IL-12 Immunomodulatory Molecules in Established CT26 Syngeneic Tumor Mice Model

### Construction of IL-12/PD-L2-Fc (Hinge) and PD-L2-Fc/IL-12 (C-Terminal) Immunomodulatory Molecules

[0627] A PD-L2-hinge-Fc fusion protein (two PD-L2-hinge-Fc polypeptides each comprising SEQ ID NO: I11) was used as parental antigen-binding protein to construct immunomodulatory molecules that bind to PD-1. To construct heterodimeric PD-L2-hinge-Fc fusion protein, one PD-L2-hinge-Fc fusion polypeptide comprises a hinge region comprising SEQ ID NO: 88, and an Fc domain subunit comprising SEQ ID NO: 97, the other PD-L2-Fc fusion polypeptide comprises a hinge region comprising SEQ ID NO: 87, and an Fc domain subunit comprising SEQ ID NO: 98. Single chain IL-12 variant described above was either positioned at the hinge region of one PD-L2-hinge-Fc polypeptide (hereinafter referred to as “IL-12/PD-L2-Fc immunomodulatory molecule”), or fused to the C-terminus of one PD-L2-hinge-Fc polypeptide (hereinafter referred to as “PD-L2-Fc/IL-12 immunomodulatory molecule”). For example, IL-12(E59A/F60A)/PD-L2-Fc immunomodulatory molecule (“construct #29” or “IW-#29”) comprises one IL-12 fusion polypeptide comprising SEQ ID NO: 17 (from N′ to C′: PD-L2 extracellular domain (SEQ ID NO: 106)-GSG linker (SEQ ID NO: 203)-single chain IL-12(E59A/F60A) variant (SEQ ID NO: 68)-hinge (SEQ ID NO: 88)-Fc domain subunit (SEQ ID NO: 97)); and one pairing polypeptide comprising SEQ ID NO: 16 (from N′ to C′: PD-L2 extracellular domain (SEQ ID NO: 106)-GSG linker (SEQ ID NO: 203)-hinge (SEQ ID NO: 87)-Fc domain subunit (SEQ ID NO: 98)). The single chain IL-12(E59A/F60A) variant within IL-12(E59A/F60A)/PD-L2-Fc immunomodulatory molecule was replaced with either single-chain IL-12 (F60A) variant (SEQ ID NO: 71) or single-chain IL-12 (G64A) variant (SEQ ID NO: 70) to construct IL-12(F60A)/PD-L2-Fc immunomodulatory molecule (“construct #30” or “IW-#30”) and IL-12(G64A)/PD-L2-Fc immunomodulatory molecule, respectively. For example, IL-12(F60A)/PD-L2-Fc immunomodulatory molecule comprises one IL-12 fusion polypeptide comprising SEQ ID NO: 18 or 142 (from N′ to C′: PD-L2 extracellular domain (SEQ ID NO: 106)-GSG linker (SEQ ID NO: 203)-single chain IL-12(F60A) variant (SEQ ID NO: 71)-hinge (SEQ ID NO: 88)-Fc domain subunit (SEQ ID NO: 97)); and one pairing polypeptide comprising SEQ ID NO: 16 or 115 (from N′ to C′: PD-L2 extracellular domain (SEQ ID NO: 106)-GSG linker (SEQ ID NO: 203)-hinge (SEQ ID NO: 87)-Fc domain subunit (SEQ ID NO: 98)). PD-L2-Fc/IL-12(F60A) immunomodulatory molecule (“construct #34” or “IW-#34”) comprises one IL-12 fusion polypeptide comprising SEQ ID NO: 20 or 143 (from N′ to C′: PD-L2 extracellular domain (SEQ ID NO: 106)-GSG linker (SEQ ID NO: 203)-hinge (SEQ ID NO: 88)-Fc domain subunit (SEQ ID NO: 97)-GGGGSGGGGSGGGGS linker (SEQ ID NO: 229)-single chain IL-12(F60A) variant (SEQ ID NO: 71)); and one pairing polypeptide comprising SEQ ID NO: 16 or 115 (from N′ to C′: PD-L2 extracellular domain (SEQ ID NO: 106)-GSG linker (SEQ ID NO: 203)-hinge (SEQ ID NO: 87)-Fc domain subunit (SEQ ID NO: 98)). The linker within the single-chain IL-12 variant (e.g., single-chain IL-12(E59A/F60A) variant) can also be changed to SEQ ID NO: 246, for example, the single-chain IL-12(E59A/F60A) variant can comprise SEQ ID NO: 254.

[0628] Nucleic acids encoding immunomodulatory molecules were chemically synthesized, cloned into a lentiviral vector, and transfected into CHO cells for expression. Expressed immunomodulatory molecules were collected from supernatant, purified by protein A chromatography, and verified on SDS-PAGE for purity.

[0629] Mice (˜20g body weight) were inoculated with 0.25×10⁶ CT26 murine colon cancer cells. Eleven days after tumor inoculation, tumor size was measured to be about 100-200 mm³. After measuring tumor size, mice were injected with 200 μg (10 mg/kg) IL-12(F60A)/PD-L2-Fc, hinge (IW-#30) immunomodulatory molecule (see FIG. 1G for structure (first polypeptide chain SEQ ID NO: 16 or 115, second polypeptide chain SEQ ID NO: 18 or 142), wherein the cytokine is a variant IL-12 F60A), 200 μg (10 mg/kg) IL-12(F60A)/PD-L2-Fc, C-terminus of HC (IW-#34) immunomodulatory molecule (see FIG. 11 for structure (first polypeptide chain SEQ ID NO: 16 or 115, second polypeptide chain SEQ ID NO: 20 or 143), wherein the cytokine is a variant IL-12 F60A; also referred to herein as PD-L2-Fc/IL-12(F60A)), or PBS (negative control). Each group had five mice. A total of three injections were given on days 11, 14, and 18 post-inoculation (indicated by black arrows in FIGS. 2A-2C). Tumor size was measured every 3 days since the first injection. The average initial (before injection) tumor volume plus or minus one standard deviation is given in parenthesis in the figure legend. Mice were sacrificed once tumor size reached over 2000 mm³. FIG. 2A depicts the average tumor volume (±standard deviation) in each treatment group. Individual mice plots for each group were also provided in FIG. 2B showing IL-12(F60A)/PD-L2-Fc, hinge (IW-#30) immunomodulatory molecule and FIG. 2C showing IL-12(F60A)/PD-L2-Fc, C-terminus of HC (IW-#34) immunomodulatory molecule. IL-12(F60A)/PD-L2-Fc, hinge (IW-#30) immunomodulatory molecule cured 4/5 mice (80% cure rate) and IL-12(F60A)/PD-L2-Fc, C-terminus of HC (IW-#34) immunomodulatory molecule cured 5/5 mice (100% cure rate). Among cured mice, the tumor inhibition efficacy of both IL-12/PD-L2-Fc immunomodulatory molecules was similar.

[0630] CT26 mice model is highly responsive to current immunotherapies, including anti-PD-1, anti-CTLA-4, and combination treatment with anti-PD-1 and anti-CTLA-4 antibodies. Data here showed that both IL-12/PD-L2-Fc immunomodulatory molecules were capable of regressing CT26 tumors in 80-100% of mice, demonstrating promising in vivo efficacy.

### Example 3: IL-12/PD-L2-Fc and PD-L2-Fc/IL-12 Immunomodulatory Molecules are Capable of Induce Specific, Anti-Tumor Memory in Cured CT26 Syngeneic Tumor Mice Models

[0631] To investigate if immunomodulatory molecules described herein can function as cancer vaccine, or prevent cancer recurrence, a tumor re-challenge was conducted on all cured mice from Example 2. Thirty days after the final immunomodulatory molecule injection, cured CT26 mice were inoculated with 0.25-106 CT26 murine colon cancer cells on the right flank and 0.25′106 EMT6 murine breast cancer cells on the left flank (as control). Tumor sizes were recorded every 4 days following re-challenge tumor inoculation. Mice were sacrificed once tumor size reached over 1000 mm³.

[0632] As shown in FIGS. 3A-3B, all cured mice previously treated with immunomodulatory molecules against CD26 tumor were protected from CT26 tumor re-challenge but not from EMT6. IL-12(F60A)/PD-L2-Fc immunomodulatory molecule (IW-#30; hinge) and PD-L2-Fc/IL-12(F60A) immunomodulatory molecule (IW-#34; C-terminus of HC) demonstrated similar protection efficacy against CT26 tumor re-challenge. These results indicate successful generation of anti-CT26 tumor memory, suggesting that immunomodulatory molecules described herein, such as both PD-L2-Fc/IL-12(F60A) immunomodulatory molecule (IW-#34; C-terminus of HC) and IL-12(F60A)/PD-L2-Fc immunomodulatory molecule (IW-#30; hinge), can serve as a cancer vaccine (e.g., against CT26 colon cancer) in mice, and/or can prevent cancer recurrence, capable of inducing induce specific, anti-tumor memory.

### Example 4: IL-12/PD-L2-Fc Immunomodulatory Molecules are Capable of Regressing Very Large CT26 Tumors (>250 mm³) or Late-Stage CT26 Tumors

[0633] Successful therapies for late-stage cancers remain a huge unmet clinical need. To study if immunomodulatory molecules described herein are effective in treating late-stage cancers, mice were inoculated with cancer cells, tumor was allowed to grow to bigger than 250 mm³, which is considered untreatable with immunotherapy in mice. Such murine tumor volume may mimic tumor burdens in advanced, late-stage human cancer patients.

[0634] Briefly, mice (˜20g body weight) were inoculated with 0.25×10⁶ CT26 murine colon cancer cells. Fourteen days after tumor inoculation, tumor size was measured to be greater than 250 mm³. The average initial tumor volume plus or minus one standard deviation is given in parenthesis in the figure legend of FIG. 4A. After measuring tumor size, mice were injected with 200 μg (10 mg/kg) IL-12(E59A/F60A)/PD-L2-Fc, hinge (constructed in Example 2, IW-#29) immunomodulatory molecule (see FIG. 1G for structure (first polypeptide chain SEQ ID NO: 16, second polypeptide chain SEQ ID NO: 17), wherein the cytokine is a variant IL-12 E59A/F60A), 200 μg (10 mg/kg) IL-12(F60A)/PD-L2-Fc, hinge (constructed in Example 2, IW-#30) immunomodulatory molecule (see FIG. 1G for structure (first polypeptide chain SEQ ID NO: 16, second polypeptide chain SEQ ID NO: 18), wherein the cytokine is a variant IL-12 F60A). Each group had seven mice. A total of three injections were given on days 14, 17, and 21 post-inoculation (indicated by black arrows). Tumor size was measured every 4 days since the first injection. Mice were sacrificed once tumor size reached over 1000 mm³. FIG. 4A depicts the average tumor volume in each treatment group.

[0635] As seen in FIG. 4A, the tumor regression efficacy difference seen between IL-12(E59A/F60A)/PD-L2-Fc, hinge (IW-#29) immunomodulatory molecule and IL-12(F60A)/PD-L2-Fc, hinge (IW-#30) immunomodulatory molecule was likely due to lower potency (e.g., receptor binding and/or signal activation ability) of double mutation IL-12(E59A/F60A) compared to single mutation IL-12(F60A). Such efficacy difference may be compensated by higher dosing per injection (e.g., 20 mg/kg vs. 10 mg/kg), or more injections (e.g., increase from 3 to 5 injections) of IL-12(E59A/F60A)-based immunomodulatory molecules.

[0636] FIG. 4B depicts pictures of a mouse over the course of treatment with IL-12(F60A)/PD-L2-Fc, hinge (IW-#30) immunomodulatory molecule. The initial tumor volume was 290.4 mm³. The structural integrity of the tumor quickly degraded within a week following first injection and formed a scab. Two weeks after initial injection, the tumor has completely regressed.

[0637] Immunotherapy (monotherapy or combination) usually fails to respond in syngeneic tumor volumes greater than 150 mm-. These conditions in murine models may equate to the tumor burden in late-stage cancer patients. Our data indicates that our IL-12/PD-L2-Fc immunomodulatory molecules can successfully treat very large syngeneic tumors (equivalent to advanced, late-stage human cancer), suggesting promising applications in clinical settings.

### Example 5: In Vivo Efficacy of IL-12/PD-L2-Fc and IL-12/Anti-PD-1 Immunomodulatory Molecules in Established EMT6 Syngeneic Tumor Mice Model

[0638] Mice (˜20g body weight) were inoculated with 0.25-:106 EMT6 murine breast cancer cells. Eleven days after tumor inoculation, tumor size was measured to be about 100-150 mm³. The average initial tumor volume plus or minus one standard deviation is given in parenthesis in the figure legend (FIG. 5A). After measuring tumor size, mice were injected with 200 μg (10 mg/kg) IL-12(E59A/F60A)/PD-L2-Fc, hinge (constructed in Example 2, IW-#29) immunomodulatory molecule (see FIG. 1G for structure (first polypeptide chain SEQ ID NO: 16, second polypeptide chain SEQ ID NO: 17)), 200 μg (10 mg/kg) IL-12(F60A)/PD-L2-Fc, hinge (constructed in Example 2, IW-#30) immunomodulatory molecule (see FIG. 1G for structure (first polypeptide chain SEQ ID NO: 16, second polypeptide chain SEQ ID NO: 18)), 200 μg (10 mg/kg) IL-12(E59A/F60A)/anti-PD-1, hinge (constructed in Example 1, IW-#48) immunomodulatory molecule (see FIG. 1C for structure (two light chains each comprising the amino acid sequence of SEQ ID NO: 50, one heavy chain comprising the amino acid sequence of SEQ ID NO: 21, and one heavy chain with the single-chain IL-12(E59A/F60A) variant positioned at the hinge region comprising the amino acid sequence of SEQ ID NO: 22), where in the Fab binds PD-1 but is not an agonist), or PBS (negative control). Each group had five mice. A total of three injections were given on days 7, 12, and 16 post-inoculation (indicated by black arrows). Tumor size was measured every 3 days since the first injection. Mice were sacrificed once tumor size reached over 1500 mm³. FIG. 5A depicts the average tumor volume in each treatment group. Individual mice plots for each group were also provided in FIG. 5B showing IL-12(E59A/F60A)/PD-L2-Fc, hinge (IW-#29) immunomodulatory molecule, FIG. 5C showing IL-12(F60A)/PD-L2-Fc, hinge (IW-430) immunomodulatory molecule, and FIG. 5D showing IL-12(E59A/F60A)/anti-PD-1, hinge (IW-#48) immunomodulatory molecule. IL-12(E59A/F60A)/PD-L2-Fc, hinge (IW-429) immunomodulatory molecule successfully inhibited tumor growth in 3/5 mice (60% cure rate) while IL-12(F60A)/PD-L2-Fc, hinge (IW-#30) immunomodulatory molecule and IL-12(E59A/F60A)/anti-PD-1, hinge (IW-#48) immunomodulatory molecule both successfully inhibited tumor growth in 5/5 mice (100% rate).

[0639] The initial average tumor size of the mouse group treated with IL-12(E59A/F60A)/anti-PD-1 immunomodulatory molecule (IW-#48) was more than twice of that of the other two test groups. These results showed that all three IL-12 immunomodulatory molecules tested could completely regress EMT6 syngeneic breast tumors in mice, with anti-PD-1 based immunomodulatory molecule having the best efficacy.

[0640] As seen in FIG. 5A, the tumor regression efficacy difference seen between IL-12(E59A/F60A)/PD-L2-Fc, hinge (IW-#29) immunomodulatory molecule and IL-12(F60A)/PD-L2-Fc, hinge (IW-#30) immunomodulatory molecule was likely due to lower potency (e.g., receptor binding and/or signal activation ability) of double mutation IL-12(E59A/F60A) compared to single mutation IL-12(F60A). Such efficacy difference may be compensated by higher dosing per injection (e.g., 20 mg/kg vs. 10 mg/kg), or more injections (e.g., increase from 3 to 5 injections) of IL-12(E59A/F60A)-based immunomodulatory molecules.

[0641] EMT6 mice model is moderately responsive to current immunotherapies. Combination treatment with anti-PD-1 and anti-CTLA-4 antibodies can significantly inhibit tumor growth but cannot completely regress the tumors. As can be seen from FIG. 5A, all IL-12/PD-L2-Fc and IL-12/anti-PD-1 immunomodulatory molecules tested were capable of regressing EMT6 tumors in 60-100% of mice, demonstrating promising in vivo efficacy.

### Example 6: IL-12/PD-L2-Fc and IL-12/Anti-PD-1 Immunomodulatory Molecules are Capable of Induce Specific, Anti-Tumor Memory in Cured EMT6 Syngeneic Tumor Mice Models

[0642] To investigate if immunomodulatory molecules described herein can function as cancer vaccine, or prevent cancer recurrence, a tumor re-challenge was conducted on all cured mice from Example 5. Thirty days after the final immunomodulatory molecule injection, cured mice were inoculated with 0.25×10⁶ EMT6 murine breast cancer cells on the right flank and 0.25×10⁶ CT26 murine colon cancer cells on the left flank (as control). Tumor sizes were recorded every 4 days following re-challenge tumor inoculation. Mice were sacrificed once tumor size reached over 1000 mm-.

[0643] As seen in FIGS. 6A-6C, all cured mice previously treated with immunomodulatory molecules against EMT6 tumor were protected from EMT6 tumor re-challenge but not from CT26. Further, all three IL-12 immunomodulatory molecules demonstrated similar protection efficacy against EMT6 tumor re-challenge. These results indicate successful generation of anti-EMT6 tumor memory, suggesting that immunomodulatory molecules described herein, such as IL-12(E59A/F60A)/PD-L2 Fc immunomodulatory molecule (IW-#29), IL-12(F60A)/PD-L2-Fc immunomodulatory molecule (IW-#30), and IL-12(E59A/F60A)/anti-PD-1 immunomodulatory molecule (IW-#48), can serve as a cancer vaccine (e.g., against breast cancer (such as EMT6) tumors) in mice, and/or can prevent cancer recurrence, capable of inducing induce specific, anti-tumor memory.

### Example 7: In Vivo Efficacy of IL-12/PD-L2-Fc and IL-12/Anti-PD-1 Immunomodulatory Molecules Show that they can Significantly Inhibit Tumor Growth in Established 4T1 Triple Negative Breast Cancer (TNBC) Syngeneic Tumor Models

[0644] 4T1 is a standard murine mammary tumor model used in preclinical studies on breast cancer metastasis. 4T1 is a refractory model for immunotherapy and does not respond to anti-PD-1, anti-CTLA-4, or combination of anti-PD-1 and anti-CTLA-4 antibody therapy.

[0645] To test the therapeutic efficacy of immunomodulatory molecules described herein on immunotherapy-resistant cancer types, mice (˜20g body weight) were inoculated with 0.25×10⁶ 4T1 murine breast cancer cells. Seven days after tumor inoculation, tumor size was measured to be about 100 mm³. The average initial tumor volume plus or minus one standard deviation is given blow the figure title (FIG. 7A-7D). After measuring tumor size, mice were injected with increasing concentrations of IL-12(F60A)/PD-L2-Fc, hinge (constructed in Example 2, IW-#30) (first polypeptide chain SEQ ID NO: 16, second polypeptide chain SEQ ID NO: 18) immunomodulatory molecule (see FIG. 1G for structure), IL-12(E59A/F60A)/PD-L2-Fc, hinge (constructed in Example 2, TW-429) (first polypeptide chain SEQ ID NO: 16, second polypeptide chain SEQ ID NO: 17) immunomodulatory molecule (see FIG. 1G for structure), IL-12(F60A)/anti-PD-1, hinge (constructed in Example 1, TW-446) immunomodulatory molecule (see FIG. 1C for structure (two light chains each comprising the amino acid sequence of SEQ ID NO: 50, one heavy chain comprising the amino acid sequence of SEQ ID NO: 21, and one heavy chain with the single-chain IL-12(F60A) variant (SEQ ID NO: 71) positioned at the hinge region comprising the amino acid sequence of SEQ ID NO: 23), where in the Fab binds PD-1 but is not an agonist), and IL-12(E59A/F60A)/anti-PD-1, hinge (constructed in Example 1, IW-#48) (two light chains each comprising the amino acid sequence of SEQ ID NO: 50, one heavy chain comprising the amino acid sequence of SEQ ID NO: 21, and one heavy chain with the single-chain IL-12(E59A/F60A) variant (SEQ ID NO: 68) positioned at the hinge region comprising the amino acid sequence of SEQ ID NO: 22) immunomodulatory molecule (see FIG. 1C for structure, where in the Fab binds PD-1 but is not an agonist): 0, 1, 3, 10, and 50 mg/kg. Each group had five mice. The range was based on maximum tolerated doses of muIL12 (0.5 mg/kg) and reported IL-12 immunomodulatory molecules (<2.5 mg/kg). Our IL-12/PD-L2-Fc immunomodulatory molecules can reach doses of up to 50 mg/kg without seeing significant toxicity symptoms. A total of three injections were given on days 8, 11, and 14 post-inoculation (indicated by black arrows). Tumor size was measured every 3 days since the first injection. Mice were sacrificed once tumor size reached over 1500 mm³.

[0646] As can be seen from FIGS. 7A-7D, all IL-12(mut)/PD-L2-Fc, PD-L2-Fc/IL-12(mut), and IL-12(mut)/anti-PD-1 immunomodulatory molecules significantly inhibited 4T1 tumor growth, following a dose-dependent response. This demonstrating promising in vivo efficacy, especially considering that 4T1 is a refractory model that does not respond to anti-PD-1, anti-CTLA-4, or combination of anti-PD-1 and anti-CTLA-4 antibody therapy.

### Example 8: In Vivo Efficacy of IL-12/PD-L2-Fc Immunomodulatory Molecules Show that it can Significantly Inhibit Tumor Growth in Established B16-F10 Syngeneic Tumor Models

[0647] B16 a murine melanoma tumor cell line used for research as a model for human skin cancers. B16 is a refractory model for immunotherapy and does not respond to anti-PD-1, anti-CTLA-4, or combination of anti-PD-1 and anti-CTLA-4 antibody therapy.

[0648] To test the therapeutic efficacy of immunomodulatory molecules described herein on more immunotherapy-resistant cancer types, mice (˜20g body weight) were inoculated with 0.25×10⁶ B16 murine melanoma cells. When tumor size reached about 50-100 mm³, mice were injected with 200 μg (10 mg/kg) IL-12(F60A)/PD-L2-Fc immunomodulatory molecule (constructed in Example 2; construct IW-#30; see FIG. 1G for structure), 200 μg (10 mg/kg) PD-L2-Fc/IL-12(F60A) immunomodulatory molecule (constructed in Example 2, construct IW-#34), or PBS (negative control). A total of three injections (10 mg/kg per injection) were given on days 10, 13, and 16 post-inoculation (indicated by black arrows in FIGS. 8A-8C). Tumor size was recorded over time. Mice were sacrificed once tumor size reached over 1000 mm³. Tumor size in parenthesis of FIG. 8A indicates average tumor size (±standard deviation) of each group when the first treatment was administered.

[0649] As seen in FIGS. 8A-8C, compared to PBS treatment group in which B16 tumor grew drastically since day 13 post-inoculation, PD-L2-Fc/IL-12(F60A) immunomodulatory molecule (IW-#34) and IL-12(F60A)/PD-L2-Fc immunomodulatory molecule (IW-#30) both significantly inhibited B16 tumor growth until after day 24 post-inoculation, indicating that both IL-12 immunomodulatory molecules can slow down tumor progression and/or extend life-span of individuals with immunotherapy-resistant cancers (e.g., melanoma), demonstrating promising in vivo efficacy.

### Example 9: In Vivo Efficacy of IL-12/PD-L2-Fc and PD-L2-Fc/IL-12 Immunomodulatory Molecules Show that it can Significantly Inhibit Tumor Growth in Established LL2 Syngeneic Tumor Models

[0650] LL2 murine lung carcinoma model is a refractory model for immunotherapy that does not respond to anti-PD-1, anti-CTLA-4, or combination of anti-PD-1 and anti-CTLA-4 antibody therapy.

[0651] To test the therapeutic efficacy of immunomodulatory molecules described herein on more immunotherapy-resistant cancer types, mice (˜20g body weight) were inoculated with 0.25×10⁶ LL2 murine lung cancer cells. About 16 days after tumor inoculation, tumor size was measured to be about 50-100 mm³. The average initial tumor volume plus or minus one standard deviation is given in parenthesis (FIG. 9A). After measuring tumor size, mice were injected with 200 μg (10 mg/kg) IL-12(F60A)/PD-L2-Fc, hinge (constructed in Example 2, IW-#30) immunomodulatory molecule (see FIG. 1G for structure) or 200 μg (10 mg/kg) IL-12(F60A)/PD-L2-Fc, C-terminus of HC (constructed in Example 2, IW-#34) immunomodulatory molecule (see FIG. 1I for structure). PBS injection served as negative control. A total of three injections (10 mg/kg per injection) were given on days 13, 16, and 20 post-inoculation (indicated by black arrows). Tumor size was measured every 4 days since the first injection. Mice were sacrificed once tumor size reached over 1000 mm³.

[0652] As seen in FIGS. 9A-9C, compared to PBS treatment group in which LL2 tumor grew drastically since about day 20 post-inoculation, PD-L2-Fc/IL-12(F60A) immunomodulatory molecule (#IW-34) and IL-12(F60A)/PD-L2-Fc immunomodulatory molecule (IW-430) significantly inhibited LL2 tumor growth until after day 32-35 post-inoculation, indicating that both IL-12 immunomodulatory molecules can slow down tumor progression and/or extend life-span of individuals with immunotherapy-resistant cancers (e.g., lung cancer), demonstrating promising in vivo efficacy, especially considering that does not respond to anti-PD-1, anti-CTLA-4, or combination of anti-PD-1 and anti-CTLA-4 antibody therapy.

[0653] To summarize, data described herein (e.g., see Examples 7, 8, and 11) demonstrate promising in vivo efficacy of immunomodulatory molecules described herein (e.g., IL-12/PD-L2-Fc based immunomodulatory molecules) in treating various advanced and/or hard-to-treat cancer types (e.g., TNBC, melanoma, lung cancer), inhibiting cancer metastasis, treating or delaying tumor progression of cancer types that are resistant to current immunotherapies (e.g., anti-PD-1 therapy, anti-CTLA-4 therapy, or a combination therapy thereof), and/or extending life-span of such patients.

### Example 10: Replacing Anti-PD-1 Parental Antibody with PD-L2-Hinge-Fc Fusion Protein Significantly Reduces Toxicity of IL-12 Immunomodulatory Molecules

[0654] 40 BALB/c mice were randomly divided into 16 groups (5 mice each group), and intraperitoneally injected with 200 μg or 1000 μg of: i) IL-12(F60A)/PD-L2-Fc immunomodulatory molecule (IW-#30), ii) IL-12(G64A)/PD-L2-Fc immunomodulatory molecule (constructed in Example 2), iii) IL-12(E59A/F60A)/PD-L2-Fc immunomodulatory molecule (IW-#29), iv) PD-L2-Fc/IL-12(F60A) immunocytokine (IL-12(F60A) moiety positioned at C′ of one Fc fragment; IW-#34), v) PD-L2-Fc/IL-12(E59A/F60A) immunocytokine (IL-12(E59A/F60A) moiety positioned at C′ of one Fc fragment), vi) IL-12(F60A)/anti-PD-1 immunomodulatory molecule (IW-#46), vii) IL-12(F60A)/anti-PD-1 immunomodulatory molecule (IW-#48), and viii) IL-12(G64A)/anti-PD-1 immunomodulatory molecule (“IW-#47”). These were constructed in Examples 1 and 2. Each group received intraperitoneal injections on Day I and Day 5. Mice were monitored daily for four parameters: i) fur texture, ii) reduced activity, iii) morbidity, and iv) weight loss greater than 10%.

[0655] As can be seen from Table 3, IL-12/anti-PD-1 immunomodulatory molecule comprising IL-12 (G64A) variant (IW-#47) showed the highest toxicity, as indicated by the death of 4/5 mice in low dose group and the death of 5/5 mice in high dose group. In contrast, treatment with IL-12/anti-PD-1 immunomodulatory molecule comprising IL-12 (F60A) variant (IW-#46) only induced one death in high dose group (1000 μg) and no death in low dose group (200 μg); treatment with IL-12/anti-PD-1 immunomodulatory molecule comprising IL-12 (E59A/F60A) variant (IW-#48) did not induce death in either dose. IL-12/anti-PD-1 immunomodulatory molecule comprising IL-12 double mutation E59A/F60A (IW-#48) also demonstrated less toxicity compared to that comprising IL-12 single F60A mutation (IW-#46), as indicated by the differences in severity of toxicity symptoms.

[0656] Among immunomodulatory molecules with IL-12 variant positioned at the hinge region, IL-12/PD-L2-Fc immunomodulatory molecule comprising IL-12 (G64A) variant showed the highest toxicity, as indicated by the death of 3/5 mice in low dose group and the death of 5/5 mice in high dose group. This is consistent with the highest toxicity results of IL-12 (G64A) among all IL-12 variants in IL-12/anti-PD-1 immunomodulatory molecule, and IL-12 (G64A) bioactivity shown in Example 1. When placing IL-12 (F60A) variant at the C-terminus of the PD-L2-hinge-Fc polypeptide (IW-#34), 2 out of 5 mice died in high dose group. In contrast, when IL-12 (F60A) variant was positioned at the hinge region of PD-L2-hinge-Fc polypeptide (IW-#30), all mice survived, even administered with high dose of immunomodulatory molecules (1000 μg).

[0657] IL-12/PD-L2-Fc immunomodulatory molecule comprising IL-12 double mutation E59A/F60A demonstrated less toxicity compared to that comprising IL-12 single F60A mutation, no matter IL-12(E59A/F60A) variant was positioned at the hinge region or at the C-terminus of Fc, as indicated by the differences in severity of toxicity symptoms. Dose-dependent toxicity was observed for most immunomodulatory molecules, as indicated by increased severity of toxicity symptoms such as worse fur texture, increased weight loss, and/or greater reduced activity when dose was increased from 200 μg to 1000 μg. IL-12(E59A/F60A)/PD-L2-Fc immunomodulatory molecule comprising IL-12 variant positioned at the hinge region (IW-#29) actually demonstrated the least toxicity in vivo among all IL-12/PD-L2-Fc, IL-12/anti-PD-1, and PD-L2-Fc/IL-12 immunomodulatory molecules, with 0 death rate and no toxicity symptom even when administered at high dose.

[0658] As can be seen from Table 3, our results indicate that replacing anti-PD-1 antigen-binding fragment with PD-L2 ligand in the IL-12-based immunomodulatory molecules can further reduce overall toxicity. For example, compare 0 death rate in high dose group of IL-12(F60A)/PD-L2-Fc (IW-#30) immunomodulatory molecule vs. 1/5 death rate in high dose group of IL-12(F60A)/anti-PD-1 (IW-#46) immunomodulatory molecule; compare 3/5 death rate in low dose group of IL-12(G64A)/PD-L2-Fc immunomodulatory molecule vs. 4/5 death rate in low dose group of IL-12(G64A)/anti-PD-1 immunomodulatory molecule (IW-#47). When comparing toxicity symptoms between the respective IL-12 variant immunomodulatory molecules, the lower toxicity of PD-L2-Fc based immunomodulatory molecules is even more obvious. For example, IL-12(E59A/F60A)/PD-L2-Fc (IW-#29) immunomodulatory molecule completely eliminated toxicity symptom compared to IL-12(E59A/F60A)/anti-PD-1 (IW-#48) immunomodulatory molecule, administered with either low or high dose; IL-12(F60A)/PD-L2-Fc (IW-#30) immunomodulatory molecule showed fewer toxicity symptoms (fur texture only) compared to those of IL-12(F60A)/anti-PD-1 (IW-#46) immunomodulatory molecule, either in low or high dose group. The reduced toxicity seen in PD-L2-Fc based IL-12 immunomodulatory molecules was likely due to stimulated PD-1 inhibitory immune checkpoint signaling upon PD-L2/PD-1 binding, which created an immunosuppression signal that “balances” against the immunostimulating/pro-inflammatory activity of IL-12. On the contrary, anti-PD-1 antibody (non-agonist Ab)-based IL-12 immunomodulatory molecules lack such immunosuppression signal, because they just bind to PD-1 but are not an agonist.

TABLE 3
In vivo toxicity of IL-12/PD-L2-Fc immunomodulatory molecules

| | | Second | | | | |
|---|---|---|---|---|---|---|
| | | binding | IL-12B | Dose | | |
| Name | Structure | domain | Mutation | (μg) | Deaths | Toxicity Symptoms |
| IL-12(F60A)/PD-L2-Fc | FIG. 1G | PD-L2 | F60A | 200 | None | Fur texture (moderate) |
| (IW-#30; hinge) | | Ligand | | 1000 | None | Far texture |
| IL-12(F60A)/anti-PD-1 | FIG. 1C | Anti-PD- | | 200 | None | Fur texture, reduced activity |
| (IW-#46; hinge) | | 1 Ab (not | | 1000 | 1/5 | Fur texture, reduced activity, |
| | | agonist) | | | | weight loss, morbidity |
| PD-L2-Fc/IL-12(F60A) | FIG. 1I | PD-L2 | | 200 | none | Fur texture, reduced activity, |
| (IW-#34; C-terminus) | | Ligand | | | | weight loss |
| | | | | 1000 | 2/5 | Fur texture, reduced activity, |
| | | | | | | weight loss, morbidity |
| IL-12(E59A/F60A)/PD- | FIG. 1G | PD-L2 | E59A/ | 200 | None | None |
| L2-Fc | | Ligand | F60A | 1000 | None | None |
| (IW-#29; hinge) | | | | | | |
| IL-12(E59A/F60A)/ | FIG. 1C | Anti-PD- | | 200 | None | Fur texture (moderate) |
| anti-PD-1 | | 1 Ab (not | | 1000 | None | Fur texture, reduced activity |
| (IW-#48; hinge) | | agonist) | | | | |
| PD-L2-Fc/IL- | FIG. 1I | PD-L2 | | 200 | None | Fur texture |
| 12(E59A/F60A) | | Ligand | | 1000 | None | Fur texture, reduced activity, |
| (C-terminus) | | | | | | weight loss |
| IL-12(G64A)/PD- | FIG. 1G | PD-L2 | G64A | 200 | 3/5 | Fur texture, reduced activity, |
| L2-Fc | | Ligand | | | | weight loss, morbidity |
| (hinge) | | | | 1000 | 5/5 | Fur texture, reduced activity, |
| | | | | | | weight loss, morbidity |
| IL-12(G64A)/anti-PD-1 | FIG. 1C | Anti-PD- | | 200 | 4/5 | Fur texture, reduced activity, |
| (IW-#47; hinge) | | 1 Ab (not | | | | weight loss, morbidity |
| | | agonist) | | 1000 | 5/5 | Fur texture, reduced activity, |
| | | | | | | weight loss, morbidity |

### Example 11: In Vivo Efficacy of IL-12 Based Immunomodulatory Molecules in 4T1 Triple Negative Breast Cancer (TNBC) Orthotopic Tumor Mice Model

[0659] 4T1 is a standard murine mammary tumor model used in preclinical studies on breast cancer metastasis. 4T1 is a refractory model for immunotherapy and does not respond to anti-PD-1, anti-CTLA-4, or combination of anti-PD-1 and anti-CTLA-4 antibody therapy. Mammary fat pad injection of 4T1 can reproducibly generate 4T1 breast-cancer-derived lung metastases.

[0660] To test the therapeutic efficacy of immunomodulatory molecules described herein on immunotherapy-resistant cancer types as well as cancer metastasis, mice (˜20 g body weight) were inoculated with 0.25×10⁶ 4T1 murine breast cancer cells in the #3 mammary gland fat pad. Tumor development was monitored for approximately 21-30 days. Four days after tumor inoculation, mice were injected with 20 mg/kg (per injection) IL-12(E59A/F60A)/PD-L2-Fc immunomodulatory molecule (constructed in Example 2; construct IW-#29), 20 mg/kg (per injection) IL-12(F60A)/PD-L2-Fc immunomodulatory molecule (constructed in Example 2; construct IW-#30), a combination of 10 mg/kg anti-PD-1 antibody and 10 mg/kg anti-CTLA-4 antibody (per injection), or PBS (negative control). A total of five injections were given every four days. Mice were sacrificed after four weeks and primary tumor was extracted from the mammary fat pad.

[0661] As seen in FIG. 16, compared to PBS control, IL-12(F60A)/PD-L2-Fc immunomodulatory molecule (IW-#30) inhibited 4T1 growth in mammary gland in all mice tested, IL-12(E59A/F60A)/PD-L2-Fc immunomodulatory molecule (IW-#29) inhibited 4T1 growth in mammary gland in 1 out of 3 mice tested, while anti-PD-1+anti-CTLA-4 combination treatment failed inhibiting 4T1 growth in mammary gland in all 3 mice tested. As discussed above, the efficacy difference was likely due to lower potency (e.g., receptor binding and/or signal activation ability) of double mutation IL-12(E59A/F60A) compared to single mutation IL-12(F60A). Such efficacy difference may be compensated by higher dosing per injection (e.g., 40 mg/kg vs. 20 mg/kg), or more injections (e.g., increase from 5 to 7 injections) of IL-12(E59A/F60A)-based immunomodulatory molecules.

[0662] To investigate the therapeutic efficacy on cancer metastasis, lungs were retrieved from sacrificed mice. Lung tissue was resuspended in collagenase/DNase solution and filtered through a 70 μm cell strainer. Cells were washed with PBS and resuspended in media. Four 1:10 serial dilutions were made. Cells were cultured in a 7% CO₂ incubator at 37° C. for 14 days to allow the formation of 4T1 cell colonies.

[0663] As seen in FIG. 17, IL-12(E59A/F60A)/PD-L2-Fc immunomodulatory molecule (IW-#29) and IL-12(F60A)/PD-L2-Fc immunomodulatory molecule (IW-#30) both significantly inhibited 4T1 metastasis in the lungs compared to the combination of anti-PD-1 and anti-CTLA-4 antibodies, or PBS (negative control). These findings were statistically significantly different (p-value <0.001).

[0664] These data demonstrating promising in vivo efficacy of IL-12 immunomodulatory molecules in treating advanced and/or hard-to-treat breast cancer (e.g., TNBC), inhibiting cancer metastasis, and possibly in treating other cancer types that are resistant to current immunotherapies.

### Example 12: Immunomodulatory Molecules with Cytokine Positioned at the Hinge Region Favor Target Antigen-Antibody (or Ligand-Receptor) Binding First, then Cytokine-Cytokine Receptor Binding Second

### Construction of IL-2 Variants and Immunomodulatory Molecules Thereof

[0665] IL-2/anti-PD-1 immunomodulatory molecule (“Fab-IL-2 mutant-Fc-PD-1 Ab”) was constructed similarly as in Example 1. An anti-human PD-1 antibody comprising nivolumab (Opdivo®) VH (SEQ ID NO: 48) and VL (SEQ ID NO: 49) sequences was used as the parental full-length antibody. The IL-2 variant comprising R38D/K43E/E61R triple mutations (SEQ ID NO: 26) was positioned within the hinge region of a heavy chain of the anti-PD-1 antibody (see FIG. 1C for exemplary structure, anti-PD-1 is antagonist Ab). The Fab-IL-2 mutant-Fc-PD-1 Ab immunomodulatory molecule (or “IL-2(R38D/K43E/E61R)/anti-PD-1 immunomodulatory molecule”) comprises two light chains each comprising the amino acid sequence of SEQ ID NO: 50, one heavy chain comprising the amino acid sequence of SEQ ID NO: 51, and one heavy chain with the IL-2 variant (SEQ ID NO: 26) positioned at the hinge region comprising the amino acid sequence of SEQ ID NO: 144.

[0666] The IL-2/PD-L2-Fc immunomodulatory molecule “ligand-IL-2 mutant-PD-L2-Fc” or “IL-2(R38D/K43E/E61R)/PD-L2-Fc immunomodulatory molecule” (“IW-#11” or “construct #11”) was constructed similarly as in Example 2. It comprises one fusion polypeptide (SEQ ID NO: 24) from N′ to C′: PD-L2 extracellular domain-GGGGS linker (SEQ ID NO: 213)-IL-2 variant (SEQ ID NO: 26)-N′ truncated IgG1 hinge (SEQ ID NO: 88)-an Fc fragment (SEQ ID NO: 97), and one pairing polypeptide (SEQ ID NO: 113) comprising from N′ to C′: PD-L2 extracellular domain-GGGGS linker (SEQ ID NO: 213)-N′ truncated IgG1 hinge (SEQ ID NO: 87)-a pairing Fc fragment (SEQ ID NO: 98).

[0667] Fab-IL-2 mutant-Fc-PD-1 Ab and ligand-IL-2 mutant-PD-L2-Fc were constructed, expressed, and purified as described in Example 1. FACS was used to confirm that both Fab-IL-2 mutant-Fc-PD-1 Ab and ligand-IL-2 mutant-PD-L2-Fc bind to HEK-PD-1-IL-2 cells (see below), but not to HEK-Blue™ IL-2 Cells (InvivoGen Cat #hkb-il2).

[0668] HEK-Blue™ IL-2 Cells and HEK-PD-1-IL-2 cells were used to assess IL-2 signal activation activity of Fab-IL-2 mutant-Fc-PD-1 Ab and ligand-IL-2 mutant-PD-L2-Fc, see below. Recombinant human IL-2 (rIL-2) served as positive control. Anti-PD-1 antibody nivolumab (Opdivo®) and parental PD-L2-Fc fusion protein (each polypeptide chain comprises SEQ ID NO: 111) served as negative controls. IL-2 signal transduction assay

[0669] HEK-Blue™ IL-2 Cells (InvivoGen Cat. #hkb-il2) and HEK-PD-1-IL-2 cells (generated in-house by overexpressing human PD-1 in HEK-Blue™ IL-2 Cells using a lentiviral vector) were used to assess IL-2 signal activation activity of the various IL-2 based immunomodulatory molecules, following the InvivoGen user manual (InvivoGen Cat. #hkb-il2), hereinafter also referred to as “HEK-IL-2 reporter assay” or “HEK-PD-1-IL-2 reporter assay.” HEK-Blue™ IL-2 reporter cells and HEK-PD-1-IL-2 reporter cells stably express the human TL-2 receptor (human IL-2Rα, TL-2Rβ, and IL-2Rγ), along with the human JAK3 and STAT5 genes to obtain a fully functional IL-2 signaling pathway. In addition, these reporter cells also carry a STAT5-inducible secreted embryonic alkaline phosphatase (SEAP) reporter gene. Upon IL-2 stimulation, HEK-Blue™ TL-2 reporter cells and HEK-PD-1-IL-2 reporter cells trigger the activation of STAT5 and the subsequent secretion of SEAP, the levels of which can be monitored using QUANTI-Blue™ (InvivoGen Cat. #rep-qbs) colorimetric enzyme assay for alkaline phosphatase activity.

[0670] Briefly, HEK-Blue™ IL-2 cells were added to various IL-2 based immunomodulatory molecules in each plate well (or recombinant human IL-2 in a well as positive control, anti-PD-1 antibody nivolumab (Opdivo®) in a well as negative control), and incubated at 37° C. in a CO₂ incubator for 20-24 hours or overnight. After incubation, supernatant was transferred to fresh plate wells, added QUANTI-Blue™ solution, and incubated at 37° C. incubator for 30 minutes-3 hours. Then SEAP levels were determined using a spectrophotometer at 620-655 nm. The activity of recombinant human IL-2 (positive control) in activating IL-2 signaling pathway was measured as 10 unit/ng and served as a reference. Percent IL-2 signal transduction for various IL-2 based immunomodulatory molecules was calculated by dividing the IL-2 based immunomodulatory molecule readout by the recombinant human IL-2 readout.

TABLE 4
IL-2 biological activity of Fab-IL-2 mutant-Fc-PD-1 Ab and ligand-IL-
2 mutant-PD-L2-Fc

| | Percent IL-2 signal | Percent IL-2 signal |
|---|---|---|
| | transduction (HEK-IL-2 | transduction (HEK-PD-1- |
| | reporter assay) | IL-2 reporter assay) |
| Recombinant human IL-2 (free state) | 100.0% | 100.0% |
| Anti-PD-1 antibody (nivolumab (Opdivo ®)) | 0.0% | 0.0% |
| Parental PD-L2-Fc fusion protein | 0.0% | 0.0% |
| Fab-IL-2 mutant-Fc-PD-1 Ab | 2.1% | 35.2% |
| (IL-2(R38D/K43E/E61R)/anti-PD-1) | | |
| ligand-IL-2 mutant-PD-L2-Fc | 2.4% | 43.5% |
| (IL-2(R38D/K43E/E61R)/PD-L2-Fc; IW-#11) | | |

[0671] Consistent with data shown above, in the absence of target antigen (PD-1) binding, IL-2 positioned at the hinge region of the immunomodulatory molecule showed little biological activity (2.1% or 2.4%) compared to free state rIL-2 (100.0%), as measured by HEK-IL-2 reporter assay. Comparing HEK-IL-2 reporter assay and HEK-PD-1-IL-2 reporter assay results in Table 4, binding of anti-PD-1 antigen-binding fragment or PD-L2 extracellular domain to PD-1 on cell surface greatly facilitated the engagement of L1-2 variant with IL-2 receptor. In other words, immunomodulatory molecules with cytokine positioned at the hinge region favored target antigen-antibody binding (Fab-LL-2 mutant-Fc-PD-1 Ab, 35.2% vs. 2.1%) or ligand-receptor binding (ligand-IL-2 mutant-PD-L2-Fc, 43.5% vs. 2.4%) first, then cytokine-cytokine receptor binding second.

[0672] IL-2/anti-HER2 and IL-2/anti-CD3 immunomodulatory molecules were constructed similarly, by positioning a mutant IL-2 moiety at one hinge region of an anti-HER2 full-length antibody comprising trastuzumab (Herceptin®) VH and VL, or an anti-CD3ε full-length antibody (made in-house), respectively. Anti-HER2/IL-2 and anti-CD3/IL-2 immunomodulatory molecules were constructed by positioning the same mutant IL-2 moiety at C-terminus of one heavy chain of the anti-HER2 full-length antibody or the anti-CD3$ full-length antibody. IL-2 mutant-Fc-Her2 Ab and IL-2 mutant-Fc-CD3 Ab were constructed by fusing the same IL-2 moiety to the N-terminus of one subunit of the Fc fragment of the anti-HER2 antibody or the anti-CD3ε antibody.

[0673] The immunomodulatory molecules were tested for activity using IL-2 signal transduction assay (HEK-Blue™ IL-2 cells, does not express CD3 or HER2) or PBMC proliferation assay. Results (data not shown) showed that cytokine (e.g., IL-2 variant) positioned at the hinge region of a heavy chain of a full-length antibody (e.g., anti-HER2 or anti-CD3 antibody) in the absence of binding of the antibody to the target antigen (e.g., HER2 or CD3) showed more restricted biological activity compared to when such cytokine was positioned at the N-terminus of a subunit of the Fc fragment, or at the C-terminus of a heavy chain of the full-length antibody. IL-2/anti-CD3 immunomodulatory molecule was able to bind to T cells via CD3, revealed the biological activity of cytokine positioned at the hinge region of one heavy chain of the anti-CD3 full-length antibody.

### PBMC Proliferation Assay

[0674] Biological activity of IL-2 can also be tested by peripheral blood mononuclear cell (PBMC) proliferation/survival assay. IL-2 is essential for the proliferation and survival of activated T-cells. Human PBMCs (80,000 cells/well) were stimulated by an anti-CD3 antibody (OKT3, 0.5 μg/mL) in the presence of increasing concentrations of recombinant human IL-2 (“rIL-2”; 0, 0.04, 0.2, 1.0, or 5.0 ng/mL). 1 ng/mL of rIL-2 was determined to be the minimal concentration required for T-cell proliferation, based on PBMC cell number (<80,000 cells/well) and viability after a 6-day culture. To determine the minimal concentration of IL-2 based immunomodulatory molecules required for T-cell proliferation, PBMCs (80,000 cells/well) were stimulated by an anti-CD3 antibody (OKT3, 0.5 μg/mL) in the presence of increasing concentrations of various formats of IL-2 based immunomodulatory molecules (0, 0.32, 1.6, 8, 40, 200, or 1000 ng/mL). Free state rIL-2 served as positive control (0.2 or 1 ng/mL). Percent T-cell proliferation of IL-2 based immunomodulatory molecule relative to rIL-2 was calculated by normalizing to corresponding molecular weights. For example, the molecular weights of IL-2/anti-HER2 immunomodulatory molecule and rIL-2 are about 162 kDa and 12 kDa, respectively, hence about 13 ng of IL-2/anti-HER2 immunomodulatory molecule is equivalent to about 1 ng of rIL-2 for the same IL-2 molar concentration.

### Example 13: Generation of IL-23/Anti-PD-1 Immunomodulatory Molecule (Fab-IL-23-Fc-PD-1 Ab) with IL-23 Biological Activity Directed to PD-1-Positive Cells

### Construction of IL-23 Variants and Immunomodulatory Molecules Thereof

[0675] IL-23 is a heterodimeric cytokine composed of p19 subunit and p40 subunit. The p40 subunit is shared with IL-12. IL-23 variants were constructed similarly as described in Example 1, by generating amino acid substitutions in the shared p40 subunit (see Table 5). A single chain IL-23 variant was made, from N′ to C′: p40 variant subunit (SEQ ID NOs: 63-66 and 140)-linker (SEQ ID NO: 229)-p19 wildtype subunit (SEQ ID NO: 73). A single chain “wildtype” IL-23 was also constructed as a control (SEQ ID NO: 74), from N′ to C′: p40 wildtype subunit-linker (SEQ ID NO: 229)-p19 wildtype subunit, referred to as “WT” in Table 5.

[0676] IL-23/anti-PD-1 immunomodulatory molecule (“Fab-IL-23(mut)-Fc-PD-1 Ab” or “Fab-IL-23(wt)-Fc-PD-1 Ab”) was constructed similarly as in Example 1. An anti-human PD-1 antibody comprising nivolumab (Opdivo®) VH (SEQ ID NO: 48) and VL (SEQ ID NO: 49) sequences was used as the parental full-length antibody. Various single chain IL-23 variants (or single chain “wildtype” IL-23 control) were positioned within the hinge region of a heavy chain of the anti-PD-1 antibody (see FIG. 1C for exemplary structure, anti-PD-1 is antagonist Ab). For example, Fab-IL-23(E59A/F60A)-Fc-PD-1 Ab immunomodulatory molecule comprising a single-chain IL-23 variant IL-12B (p40 E59A/F60A)-linker-IL-23A (wt p19) (SEQ ID NO: 75) positioned at the hinge region comprises two light chains each comprising the amino acid sequence of SEQ ID NO: 50, one heavy chain comprising the amino acid sequence of SEQ ID NO: 51, and one heavy chain with the single-chain IL-23 variant (SEQ ID NO: 75) positioned at the hinge region comprising the amino acid sequence of SEQ ID NO: 145. Immunomodulatory molecules were constructed, expressed, and purified as described in Example 1. The heavy chain comprising the amino acid sequence of SEQ ID NO: 51 can also be replaced with a heavy chain comprising the amino acid sequence of SEQ ID NO: 21.

### IL-23 Signal Transduction Assay

[0677] HEK-Blue™ IL-23 Cells (InvivoGen Cat. #hkb-il23) and HEK-PD-1-IL-23 cells (generated in-house by overexpressing human PD-1 in HEK-Blue™ IL-23 Cells using a lentiviral vector) were used to assess IL-23 signal activation activity of the various Fab-IL-23-Fc-PD-1 Ab immunomodulatory molecules comprising different IL-23 moieties, following the InvivoGen user manual (InvivoGen Cat. #hkb-il23), hereinafter also referred to as “HEK-IL-23 reporter assay” or “HEK-PD-1-IL-23 reporter assay.” HEK-Blue™ IL-23 reporter cells and HEK-PD-1-IL-23 reporter cells stably express the receptor complex consisting of IL-12Rβ1 and the IL-23 receptor (IL-23R), along with the human STAT3 gene to obtain a fully functional IL-23 signaling pathway (TyK2/JAK2/STAT3). In addition, these reporter cells also carry a STAT3-inducible SEAP reporter gene. Upon IL-2 stimulation, HEK-Blue™ 11-23 reporter cells and HEK-PD-1-IL-23 reporter cells trigger the activation of STAT3 and the subsequent secretion of SEAP, the levels of which can be monitored using QUANTI-Blue™ (InvivoGen Cat. #rep-qbs) colorimetric enzyme assay for alkaline phosphatase activity. Experimental procedure was similar as described in Example 12 for IL-2 signal transduction assay. Recombinant human IL-23 (rIL-23) in free state served as positive control and reference for percent activity calculation.

TABLE 5
IL-23 biological activity of Fab-IL-23-Fc-PD-1 Abs comprising different IL-23 moieties

| | rIL-23 | “WT” | G64A | E59A | F60A | E59A/F60A |
|---|---|---|---|---|---|---|
| HEK-IL-23 cells | 100.0% | 70.0% | 56.0% | 6.9% | 8.2% | 0.0% |
| HEK-PD-1-IL-23 cells | 100.0% | 150.0% | 180.0% | 39.0% | 46.0% | 4.8% |

[0678] As can be seen from Table 5, positioning IL-23 comprising a wildtype p40 subunit at the hinge region retained IL-23 activity of about 70.0%, even in the absence of target antigen (PD-1)-antibody binding in HEK-IL-23 reporter cells. E59A and F60A mutations in p40 subunit significantly reduced IL-23 activity to about 6.9% or 8.2% in the absence of PD-1/anti-PD-1 antibody binding, which was rescued to about 39.0% or 46.0% in the presence of PD-1/anti-PD-1 antibody binding in HEK-PD-1-IL-23 cells. Fab-IL-23-Fc-PD-1 Ab comprising E59A/F60A double mutations in IL-23 p40 subunit (“Fab-IL-23(E59A/F60A)-Fc-PD-1 Ab”) demonstrated PD-1-positive cell specific IL-23 biological activity (4.8%), with no cross reactivity with PD-1-negative cells (0.0%). These data demonstrate successful generation of anti-PD-1 antibody-based immunomodulatory molecules that can specifically target cytokine (e.g., IL-23) biological activity towards PD-1+ cells.

[0679] IL-23/anti-CD4 immunomodulatory molecules were similarly generated using an anti-CD4 antibody comprising Ibalizumab (Trogarzo®) V_{H} and V_{L} as parental Ab, and placing IL-23 moiety at one hinge region of the full-length anti-CD4 antibody. The IL-23 biological activity of various Fab-IL-23-Fc-CD4 Abs was measured using the IFN-γ release assay. rIL-23 served as positive control and percent activity reference. Positioning IL-23 comprising a wildtype p40 subunit at the hinge region still retained IL-23 activity of about 21.0%, even in the absence of target antigen (CD4)-antibody binding in CD8+ T cells; the activity was 34.0% with the presence of CD4/anti-CD4 antibody binding. E59A and F60A mutations in p40 subunit significantly reduced IL-23 activity to about 2.0/6 or 1.5% in the absence of CD4/anti-CD4 antibody binding, which was rescued to about 24.0% or 29.0% in the presence of CD4+ T cells/anti-CD4 antibody binding. Fab-IL-23-Fc-CD4 Ab comprising E59A/F60A double mutations in IL-23 p40 subunit (“Fab-IL-23(E59A/F60A)-Fc-CD4 Ab”) demonstrated CD4+ T cells specific IL-23 biological activity (6.8%), with no cross reactivity with CD8+ T cells (0.0%). These demonstrate successful generation of anti-CD4 antibody-based immunomodulatory molecules that can specifically target cytokine (e.g., IL-23) biological activity towards CD4-positive cells.

### Interferon-Gamma Release Assay (IGRA) for Measuring IL-12 or IL-23 Biological Activity

[0680] IL-23 and IL-12 can stimulate activated CD4+ or CD8+ T cells to release IFN-γ. The biological activity of IL-12 or IL-23 can be measured by the amount of IFN-γ released from activated T cells. Binding of IL-12 to its receptor (heterodimeric receptor composed of IL-12R-01 and IL-12R-β2 subunits) triggers a signaling pathway involving TyK2 (tyrosine kinase 2), JAK2 (Janus kinase 2) and STAT4 (signal transducer and activator of transcription 4) which results in the production of IFN-γ. CD4+ T cells or CD8+ T cells were isolated from PBMC, and stimulated by anti-CD3 antibody (1 μg/mL OKT3) in the presence of recombinant human IL-2 (30 units/mL) for 5 days. After 5 days, the activated CD4+ or CD8+ T cells (80,000 cells/well) were cultured in the presence of increasing concentrations of recombinant human IL-12 (rIL-12) or recombinant human IL-23 (rIL-23) (0, 0.62, 1.25, 2.5, 5, 10, or 20 ng/mL). The following day, the amount of IFN-γ released into the cell culture medium was measured by an ELISA assay. Percent IL-12 or IL-23 biological activity was calculated by dividing the readout of IL-12-based immunomodulatory molecules or IL-23-based immunomodulatory molecules by the readout of rIL-12 or rIL-23.

[0681] The minimal concentration of rIL-12 required to stimulate the release of IFN-γ from activated T cells was 2.5 ng/ml, while for rIL-23 it was 5 ng/ml. To determine the minimal concentration of the IL-12-based immunomodulatory molecules or IL-23-based immunomodulatory molecules to observe a positive biological response, activated CD4+ or CD8+ T cells (80,000 cells/well) were cultured overnight in the presence of increasing concentrations of IL-12-based immunomodulatory molecules or IL-23-based immunomodulatory molecules (0, 0.32, 1.6, 8, 40, 200, or 1000 ng/mL). rIL-12 (2.5 ng/mL) or rIL-23 (5 ng/mL) served as positive control. The percent biological activity of the IL-12-based immunomodulatory molecule or IL-23-based immunomodulatory molecule relative to corresponding free state cytokine (rIL-12 or rIL-23) was calculated by normalizing to corresponding molecular weights. The molecular weights of IL-12-based immunomodulatory molecule and rIL-12 are about 220 kDa and about 70 kDa, respectively. The molecular weights of IL-23-based immunomodulatory molecules and rIL-23 are about 215 kDa and about 65 kDa, respectively. Hence, about 3 ng of IL-12-based immunomodulatory molecule or TL-23-based immunomodulatory molecule is equivalent to about 1 ng of rIL-12 or rIL-23 for the same IL-12 or IL-23 molar concentration.

### Example 14: Generation of IL-10/Anti-PD-1 Immunomodulatory Molecule (Fab-IL-10-Fe-PD-1 Ab) with IL-10 Biological Activity Directed to PD-1-Positive Cells

### Construction of IL-10 Variants and Immunomodulatory Molecules Thereof

[0682] IL-10 is naturally expressed as a non-covalently linked homodimer. IL-10 variants were constructed by replacing amino acids from position 24 to 32 with Alanine or Serine (see Table 6), and a single chain IL-10 variant was made, from N′ to C′: IL-10 variant subunit (SEQ ID NOs: 53-58)-linker (SEQ ID NO: 227)-IL-10 variant subunit (SEQ ID NOs: 53-58). A single chain “wildtype” IL-10 was also constructed as a control (SEQ ID NO: 59), from N′ to C′: IL-10 wildtype subunit (SEQ ID NO: 52)-linker (SEQ ID NO: 227)-IL-10 wildtype subunit, referred to as “WT” in Table 6.

[0683] IL-10/anti-PD-1 immunomodulatory molecule (“Fab-IL-10(mut)-Fc-PD-1 Ab” or “Fab-IL-10(wt)-Fc-PD-1 Ab”) was constructed similarly as in Example 1. An anti-human PD-1 antibody comprising nivolumab (Opdivo®) VH (SEQ ID NO: 48) and VL (SEQ ID NO: 49) sequences was used as the parental full-length antibody. Various single chain IL-10 variants (or single chain “wildtype” IL-10 control) were positioned within the hinge region of a heavy chain of the anti-PD-1 antibody (see FIG. 1C for exemplary structure, anti-PD-1 is antagonist Ab). For example, Fab-IL-10(R27A)-Fc-PD-1 Ab immunomodulatory molecule (“IL-10(R27A)/anti-PD-1”) comprising a single-chain IL-10 variant IL-10(R27A)-linker-IL-10(R27A) (SEQ ID NO: 60) positioned at the hinge region comprises two light chains each comprising the amino acid sequence of SEQ ID NO: 50, one heavy chain comprising the amino acid sequence of SEQ ID NO: 51, and one heavy chain with the single-chain IL-10 variant (SEQ ID NO: 60) positioned at the hinge region comprising the amino acid sequence of SEQ ID NO: 146. The heavy chain comprising the amino acid sequence of SEQ ID NO: 51 can also be replaced with a heavy chain comprising the amino acid sequence of SEQ ID NO: 21. Immunomodulatory molecules were constructed, expressed, and purified as described in Example 1. IL-10 signal transduction assay

[0684] HEK-Blue™ IL-10 Cells (InvivoGen Cat. #hkb-il10) and HEK-PD-1-IL-10 cells (generated in-house by overexpressing human PD-1 in HEK-Blue™ IL-10 Cells using a lentiviral vector) were used to assess IL-10 signal activation activity of the various Fab-IL-10-Fc-PD-1 Abs comprising different IL-10 moieties, following the InvivoGen user manual (InvivoGen Cat. #hkb-il10), hereinafter also referred to as “HEK-IL-10 reporter assay” or “HEK-PD-1-IL-10 reporter assay.” HEK-Blue™ IL-10 reporter cells and HEK-PD-1-IL-10 reporter cells stably express IL-10 receptor hIL-10Rα. and hIL-10Rβ chains, human STAT3, and STAT3-inducible SEAP. Binding of IL-10 to its receptor on the surface of HEK-Blue™ IL-10 cells or HEK-PD-1-IL-23 reporter cells triggers JAK1/STAT3 signaling and the subsequent production of SEAP, the level of which in the cell culture supernatant can be monitored using QUANTI-Blue™ (InvivoGen Cat. #rep-qbs). Experimental procedure was similar as described in Example 12 for IL-2 signal transduction assay. Recombinant human IL-10 (rIL-10) in free state served as positive control and reference for percent activity calculation.

TABLE 6
IL-10 biological activity of Fab-IL-10-Fc-PD-1 Abs comprising different IL-10 moieties

| | rIL-10 | “WT” | R24A | D25A/L26A |
|---|---|---|---|---|
| HEK-IL-10 cells | 100.0% | 26.0% | 15.0% | 4.0% |
| HEK-PD-1-IL-10 cells | 100.0% | 200.0% | 150.0% | 56.0% |
| | R27A | D28A/A29S | F30A/S31A | R32A |
| HEK-IL-10 cells | <0.1% | 17.0% | 13.0% | 10.0% |
| HEK-PD-1-IL-10 cells | 21.0% | 70.0% | 67.0% | 42.0% |

[0685] As can be seen from Table 6, positioning IL-10 comprising wildtype IL-10 subunit at the hinge region still retained IL-10 activity of about 26.0%, even in the absence of target antigen (PD-1)-antibody binding in HEK-IL-10 cells. All IL-10 variants tested reduced IL-10 activity in the absence of PD-1/anti-PD-1 antibody binding compared to that of “wildtype” IL-10, and their IL-10 activity was rescued in the presence of PD-1/anti-PD-1 antibody binding in HEK-PD-1-IL-10 cells. Fab-IL-10-Fc-PD-1 Ab comprising R27A mutation in IL-10 (“Fab-IL-10(R27A)-Fc-PD-1 Ab”) demonstrated PD-1-positive cell specific IL-10 biological activity (21.0%), with minimal cross reactivity with PD-1-negative cells (<0.1%). These data demonstrate successful generation of anti-PD-1 antibody-based immunomodulatory molecules that can specifically target cytokine (e.g., IL-10) biological activity towards PD-1-positive cells.

### Example 15: Generation of IFN-γ/Anti-PD-1 Immunomodulatory Molecule (Fab-IFN-γ-Fc-PD-1 Ab) with IFN-γ Biological Activity Directed to PD-1-Positive Cells

### Construction of IFN-γ Variants and Immunomodulatory Molecules Thereof

[0686] IFN-γ is naturally expressed as a symmetric homodimer. IFN-γ variants were constructed by replacing amino acids from position 20 to 25 with A, K, S, E, Q, or V (see Table 7), and a single chain IFN-γ variant was made, from N′ to C′: IFN-γ variant subunit (SEQ ID NOs: 39-45)-linker (SEQ ID NO: 227)-IFN-γ variant subunit (SEQ ID NOs: 39-45). A single chain “wildtype” IFN-γ was also constructed as a control (SEQ ID NO: 46), from N′ to C′: IFN-γ wildtype subunit (SEQ ID NO: 38)-linker (SEQ ID NO: 227)-IFN-γ wildtype subunit (SEQ ID NO: 38), referred to as “WT” in Table 7.

[0687] IFN-γ/anti-PD-1 immunomodulatory molecule (“Fab-IFN-γ(mut)-Fc-PD-1 Ab” or “Fab-IFN-γ(wt)-Fc-PD-1 Ab”) was constructed similarly as in Example 1. An anti-human PD-1 antibody comprising nivolumab (Opdivo®) VH (SEQ ID NO: 48) and VL (SEQ ID NO: 49) sequences was used as the parental full-length antibody. Various single chain IFN-γ variants (or single chain “wildtype” IFN-γ control) were positioned within the hinge region of a heavy chain of the anti-PD-1 antibody (see FIG. 1C for exemplary structure, anti-PD-1 is antagonist Ab). For example, Fab-IFN-γ(A23V)-Fc-PD-1 Ab immunomodulatory molecule (“IFN-γ(A23V)/anti-PD-1”) comprising a single-chain IFN-γ variant IFN-γ(A23V)-linker-IFN-γ(A23V) (SEQ ID NO: 47) positioned at the hinge region comprises two light chains each comprising the amino acid sequence of SEQ ID NO: 50, one heavy chain comprising the amino acid sequence of SEQ ID NO: 51, and one heavy chain with the single-chain IFN-γ variant (SEQ ID NO: 47) positioned at the hinge region comprising the amino acid sequence of SEQ ID NO: 147. The heavy chain comprising the amino acid sequence of SEQ ID NO: 51 can also be replaced with a heavy chain comprising the amino acid sequence of SEQ ID NO: 21. The single-chain homodimer IFN-γ (A23V/A23V) variant can comprise sequence of SEQ ID NO: 47 or 252. Immunomodulatory molecules were constructed, expressed, and purified as described in Example 1.

### IFN-γ Signal Transduction Assay

[0688] HEK-Blue™ IFN-γ Cells (InvivoGen Cat. #hkb-ifng) and HEK-PD-1-IFN-γ cells (generated in-house by overexpressing human PD-1 in HEK-Blue™ IFN-γ Cells using a lentiviral vector) were used to assess IFN-γ signal activation activity of the various Fab-IFN-γ-Fc-PD-1 Abs comprising different IFN-γ moieties, following the InvivoGen user manual (InvivoGen Cat. #hkb-ifng), hereinafter also referred to as “HEK-IFN-γ reporter assay” or “HEK-PD-1-IFN-γ reporter assay.” HEK-Blue™ IFN-γ reporter cells and HEK-PD-1-IFN-γ reporter cells stably express human STAT1 gene, and STAT1-inducible SEAP. The other genes of the pathway are naturally expressed in sufficient amounts in the reporter cells. Binding of IFN-γ to its heterodimeric receptor consisting of IFNGR1 and IFNGR2 chains on the surface of HEK-Blue™ IFN-γ cells or HEK-PD-1-IFN-γ reporter cells triggers JAK1/JAK2/STAT1 signaling and the subsequent production of SEAP, the level of which in the cell culture supernatant can be monitored using QUANTI-Blue™ (InvivoGen Cat #rep-qbs). Experimental procedure was similar as described in Example 12 for IL-2 signal transduction assay. Recombinant human IFN-γ (rIFN-γ) in free state served as positive control and reference for percent activity calculation.

TABLE 7
IFN-γ biological activity of Fab-IFN-γ-Fc-PD-1 Abs comprising different IFN-γ moieties

| | rIFN-γ | “WT” | S20A/D21A | D21K | V22A/A23S |
|---|---|---|---|---|---|
| HEK-IFN-γ cells | 100.0% | 36.0% | 30.0% | 35.0% | 1.2% |
| HEK-PD-1-IFN-γ cells | 100.0% | 130.0% | 89.0% | 110.0% | 24.0% |

| | D24A/N25A | A23E/D24E/N25K | A23Q | A23V |
|---|---|---|---|---|
| HEK-IFN-γ cells | 21.0% | 0.2% | 0.8% | 0.6% |
| HEK-PD-1-IFN-γ cells | 70.0% | 23.0% | 31.0% | 27.0% |

[0689] As can be seen from Table 7, positioning IFN-γ comprising wildtype IFN-γ subunit at the hinge region retained IFN-γ activity of about 36.0%, even in the absence of target antigen (PD-1)-antibody binding in HEK-IFN-γ cells. A23 residue appears critical for IFN-γ biological activity, as all IFN-γ variants comprising A23 mutation greatly reduced IFN-γ activity in the absence of PD-1/anti-PD-1 antibody binding compared to that of “wildtype” IFN-γ, and their IFN-γ activity was rescued in the presence of PD-1/anti-PD-1 antibody binding in HEK-PD-1-IFN-γ cells. Fab-IFN-γ-Fc-PD-1 Ab comprising A23V mutation in IFN-γ (“Fab-IFN-γ(A23V)-Fc-PD-1 Ab”) demonstrated PD-1-positive cell specific IFN-γ biological activity (27.0%), with minimal cross reactivity with PD-1-negative cells (0.6%). Fab-IFN-γ-Fc-PD-1 Ab comprising A23E/D24E/N25K triple mutations in IFN-γ (“Fab-IFN-γ(A23E/D24E/N25K)-Fc-PD-1 Ab”) demonstrated PD-1-positive cell specific IFN-γ biological activity (23.0%), with minimal cross reactivity with PD-1-negative cells (0.2%). These data demonstrate successful generation of anti-PD-1 antibody-based immunomodulatory molecules that can specifically target cytokine (e.g., IFN-γ) biological activity towards PD-1-positive cells.

[0690] IFN-γ/anti-CD4 immunomodulatory molecules were similarly generated, and showed similar IFN-γ activities as IFN-r/anti-PD-1 immunomodulatory molecules (data now shown). IFN-γ can induce PD-L1 expression on cell surface. All IFN-γ variants comprising A23 mutation greatly reduced IFN-γ activity close to baseline level in the absence of CD4/anti-CD4 antibody binding compared to that of “WT” IFN-γ, and their IFN-γ activity was rescued in the presence of CD4/anti-CD4 antibody binding. Fab-IFN-γ-Fc-CD4 Ab comprising A23E/D24E/N25K triple mutations in IFN-γ (“Fab-IFN-γ(A23E/D24E/N25K)-Fc-CD4 Ab”) or A23V mutation (“Fab-IFN-γ(A23V)-Fc-CD4 Ab”) demonstrated CD4+ cell specific IFN-γ biological activity, with no or little cross reactivity with CD4-negative cells. These demonstrate successful generation of anti-CD4 antibody-based immunomodulatory molecules that can specifically target cytokine (e.g., IFN-γ) biological activity towards CD4-positive cells.

### Example 16: Generation of IFN-α2b/Anti-PD-1 Immunomodulatory Molecule (Fab-IFN-α2b-Fc-PD-1 Ab) with IFN-α2b Biological Activity Directed to PD-1-Positive Cells

### Construction of IFN-α2b Variants and Immunomodulatory Molecules Thereof

[0691] IFN-α2b (Intron-A®) is an antiviral or antineoplastic drug. It is a recombinant form of IFN-α2. IFN-α2b variants were constructed by replacing amino acids at positions 30 and 32-34 with Alanine (SEQ ID NOs: 32, 34, 35, and 36; see Table 8).

[0692] IFN-α2b/anti-PD-1 immunomodulatory molecule (“Fab-IFN-α2b(mut)-Fc-PD-1 Ab” or “Fab-IFN-α2b(wt)-Fc-PD-1 Ab”) was constructed similarly as in Example 1. An anti-human PD-1 antibody comprising nivolumab (Opdivo®) V_{H} (SEQ ID NO: 48) and V_{L} (SEQ ID NO. 49) sequences was used as the parental full-length antibody. Various IFN-α2b variants (or wildtype IFN-α2b control “WT”) were positioned within the hinge region of a heavy chain of the anti-PD-1 antibody (see FIG. 1C for exemplary structure, anti-PD-1 is antagonist Ab). For example, the Fab-IFN-α2b(L30A)-Fc-PD-1 Ab immunomodulatory molecule (“IFN-α2b(L30A)/anti-PD-1”) comprises two light chains each comprising the amino acid sequence of SEQ ID NO: 50, one heavy chain comprising the amino acid sequence of SEQ ID NO: 51, and one heavy chain with the IFN-α2b(L30A) variant (SEQ ID NO: 32) positioned at the hinge region comprising the amino acid sequence of SEQ ID NO: 148. The heavy chain comprising the amino acid sequence of SEQ ID NO: 51 can also be replaced with a heavy chain comprising the amino acid sequence of SEQ ID NO: 21 or a heavy chain comprising a different linker (e.g., GSGGGGG; SEQ ID NO: 206) at the hinge region. Immunomodulatory molecule were constructed, expressed, and purified as described in Example 1.

### IFN-α/β Signal Transduction Assay

[0693] HEK-Blue™ IFN-α/D cells (InvivoGen Cat. #hkb-ifnab) and HEK-PD-1-IFN-α/β cells (generated in-house by overexpressing human PD-1 in HEK-Blue™ IFN-α/0 cells using a lentiviral vector) were used to assess IFN-α2b signal activation activity of the various Fab-IFN-α2b-Fc-PD-1 Abs comprising different IFN-α2b moieties, following the InvivoGen user manual (InvivoGen Cat. #hkb-ifnab), hereinafter also referred to as “HEK-IFN-α/β reporter assay” or “HEK-PD-1-IFN-α/β reporter assay.” HEK-Blue™ IFN-α/β reporter cells and HEK-PD-1-IFN-α/β reporter cells were generated by stable transfection of HEK293 cells with the human STAT2 and IRF9 genes to obtain a fully active type I IFN signaling pathway, and inducible SEAP under the control of IFN-α/s inducible ISG54 promoter. The other genes of the pathway (IFNAR1, IFNAR2, JAK1, TyK2, and STAT1) are naturally expressed by these cells. Binding of IFN-α or IFN-β to its heterodimeric receptor consisting of IFNAR1 and IFNAR2 chains triggers JAK/STAT/ISGF3 signaling and subsequent production of SEAP, the level of which in the cell culture supernatant can be monitored using QUANTI-Blue™ (InvivoGen Cat. #rep-qbs). Experimental procedure was similar as described in Example 12 for IL-2 signal transduction assay. IFN-α2b in free state served as positive control and reference for percent activity calculation.

TABLE 8
IFN-α2b biological activity of Fab-IFN-α2b-Fc-PD-1
Abs comprising different IFN-α2b moieties

| | IFN-α2b | | | | | |
|---|---|---|---|---|---|---|
| | (free state) | “WT” | L30A | D32A | R33A | H34A |
| HEK-IFN-α/β cells | 100.0% | 54.0% | 15.0% | 9.0% | 5.0% | 20.0% |
| HEK-PD-1-IFN-α/β cells | 100.0% | 96.0% | 110.0% | 50.0% | 25.0% | 56.0% |

[0694] As can be seen from Table 8, positioning wildtype IFN-α2b at the hinge region of the anti-PD-1 antibody retained IFN-α2b activity of about 54.0%, even in the absence of target antigen (PD-1)-antibody binding in HEK-IFN-α/0 cells. L30, D32, R33, and H34 residues all appear critical for IFN-α2b biological activity, as all IFN-α2b variants greatly reduced IFN-α2b activity in the absence of PD-1/anti-PD-1 antibody binding compared to that of wildtype IFN-α2b, and their IFN-α2b activity was rescued in the presence of PD-1/anti-PD-1 antibody binding in HEK-PD-1-IFN-α/β cells. Fab-IFN-α2b-Fc-PD-1 Ab comprising L30A mutation in IFN-α2b (“Fab-IFN-α2b(L30A)-Fc-PD-1 Ab”) demonstrated PD-1-positive cell specific IFN-α2b biological activity (110.0%), with greatly reduced cross reactivity with PD-1-negative cells (15.0%). Fab-IFN-α2b-Fc-PD-1 Ab comprising R33A mutation in IFN-α2b (“Fab-IFN-α2b(R33A)-Fc-PD-1 Ab”) demonstrated PD-1-positive cell specific IFN-α2b biological activity (25.00%6), with greatly reduced cross reactivity with PD-1-negative cells (5.0%). These data demonstrate successful generation of anti-PD-1 antibody-based immunomodulatory molecules that can specifically target cytokine (e.g., IFN-α2b) biological activity towards PD-1-positive cells, with reduced cytokine biological activity towards PD-1-negative cells.

### Example 17: Placing IL-2 Variant at the Hinge Region of the IL-2/PD-L2-Fc Immunomodulatory Molecules Significantly Reduces Toxicity in Mice

[0695] IL-2/PD-L2-Fc (hinge) and PD-L2-Fc/IL-2 (C-terminal) immunomodulatory molecules were similarly constructed as in Examples 2 and 12.

[0696] 25 BALB/c mice were randomly divided into 5 groups (5 mice each group), and intraperitoneally injected with 200 μg or 1000 μg of IL-2(R38D/K43E/E61R)/PD-L2-Fc immunomodulatory molecule (“IW-#11” or “construct #11”; constructed in Example 12), PD-L2-Fc/IL-2(R38D/K43E/E61R) immunomodulatory molecule (IL-2(R38D/K43E/E61R) moiety (SEQ ID NO: 26) fused to the C′ of one Fc fragment of a parental PD-L2-hinge-Fc fusion protein), or parental PD-L2-hinge-Fc fusion protein (two PD-L2-hinge-Fc polypeptides each comprising SEQ ID NO: 111) as control. Each group received intraperitoneal injections on Day I and Day 5. Mice were monitored daily for four parameters: i) fur texture, ii) reduced activity, iii) morbidity, and iv) weight loss greater than 10%.

[0697] As can be seen from Table 9, when placing IL-2 variant at the C-terminus of the PD-L2-hinge-Fc polypeptide, five out of five mice died 4-6 days post injection, in both high and low dose groups. In contrast, when IL-2 variant was positioned at the hinge region, all mice survived, even administered with high dose of immunomodulatory molecules (1000 μg). Same survival rate was observed in the control group (PD-L2-Fc without IL-2 fusion). For immunomodulatory molecules with IL-2 variant positioned at the hinge region, toxicity appeared to be dose-dependent, as indicated by increased weight loss and greater reduced activity when dose was increased from 200 μg to 1000 μg.

TABLE 9
In vivo toxicity of IL-2/PD-L2-Fc immunocytokines of different formats

| Construct | Dose (μg) | Deaths in group | Toxicity symptoms |
|---|---|---|---|
| IL-2(R38D/K43E/E61R)/PD-L2-Fc | 200 | None | Fur texture, reduced activity |
| immunocytokine | 1000 | None | Fur texture, reduced activity, |
| (IL-2 positioned at hinge region; | | | weight loss |
| construct #11) | | | |
| PD-L2-Fc/IL-2(R38D/K43E/E61R) | 200 | 5/5 | Fur texture, reduced activity, |
| immunocytokine | | | weight loss, morbidity |
| (IL-2 fused to the C′ of Fc) | 1000 | 5/5 | Fur texture, reduced activity, |
| | | | weight loss, morbidity |
| Parental PD-L2-hinge-Fc fusion | 1000 | None | None |
| protein (control) | | | |

### Example 18: In Vivo Efficacy of IL-12 Immunomodulatory Molecules in 4T1 Syngeneic Tumor Mice Model

### Construction of IL-12(E59A/F60A)/IL-2(R38D/K43E/E61R)/Anti-PD-1 Immunomodulatory Molecule

[0698] As described in Example 1, an anti-human PD-1 antibody comprising nivolumab (Opdivo®)) VH and VL was used as the parental full-length antibody. The IL-2 R38D/K43E/E61R variant (SEQ ID NO: 26) was positioned within the hinge region of one heavy chain of the heterodimeric anti-PD-1 antibody, and the single-chain IL-12 E59A/F60A variant (SEQ ID NO: 68) was positioned within the hinge region of the other heavy chain of the heterodimeric anti-PD-1 antibody, to construct the “IL-12(E59A/F60A)/IL-2(R38D/K43E/E61R)/anti-PD-1 immunomodulatory molecule” (“IW-#54” or “construct #54”). The linker within the single-chain IL-12(E59A/F60A) variant can also be changed to SEQ ID NO: 246, and the single-chain IL-12(E59A/F60A) variant can comprise SEQ ID NO: 254. The construct was expressed and purified as described in Example 1.

[0699] Mice (˜20g body weight) were inoculated with 0.25×10⁶ 4T1 murine breast cancer cells. Seven days after tumor inoculation, tumor size was measured to be about 50-150 mm³. After measuring tumor size, mice were injected with 10 mg/kg (˜200 μg) IL-12(E59A/F60A)/anti-PD-1 immunomodulatory molecule (constructed in Example 1; IW-#48), 10 mg/kg (˜200 μg) IL-12(E59A/F60A)/PD-L2-Fc immunomodulatory molecule (constructed in Example 2; IW-#29), 5 mg/kg (˜100 μg) IL-12(E59A/F60A)/IL-2(R38D/K43E/E61R)/anti-PD-1 immunomodulatory molecule (IW-#54), or PBS (negative control). A total of three injections (10 mg/kg or 5 mg/kg per injection, respectively) were given on days 7, 13, and 19 post-inoculation (indicated by black arrows in FIG. 18). Tumor size was measured every 3 days since the first injection. Mice were sacrificed once tumor size reached over 2000 mm³.

[0700] Breast cancer as reflected by 4T1 mice model is highly resistant to current immunotherapies, including anti-PD-1, anti-CTLA-4, and combination treatment with anti-PD-1 and anti-CTLA-4 antibodies. As can be seen from FIG. 18, all three IL-12-based immunomodulatory molecules significantly inhibited 4T1 tumor growth, demonstrating promising in vivo efficacy.

[0701] Further, IL-12(E59A/F60A)/anti-PD-1 (IW-#48) and IL-12(E59A/F60A)/PD-L2-Fc (IW-#29) showed similar cytotoxicity against 4T1 tumor when administered at the same dose (FIG. 18). In combination with results from Example 10, these data further demonstrate that compared to anti-PD-1 antigen-binding domain (non-agonist Ab) which blocks (or does not induce) PD-1 immunosuppression signal, using PD-L2 extracellular domain in the immunomodulatory molecule construct can not only achieve similar anti-tumor effect, but also reduce unwanted toxicity, likely by balancing the immunostimulating/pro-inflammatory activity of cytokines (e.g., IL-12) with an immunosuppression signal from PD-L2/PD-1 signaling.

### Example 19: In Vivo Efficacy of IL-12 Immunomodulatory Molecules in EMT6 Syngeneic Tumor Mice Model

[0702] Mice (˜20g body weight) were inoculated with 0.25×10⁶ EMT6 murine breast cancer cells. Seven days after tumor inoculation, tumor size was measured to be about 50-150 mm³. After measuring tumor size, mice were injected with 10 mg/kg (˜200 μg) IL-12(E59A/F60A)/anti-PD-1 immunomodulatory molecule (constructed in Example 1; IW-#48), 10 mg/kg (˜200 μg) IL-12(E59A/F60A)/PD-L2-Fc immunocytokine (constructed in Example 2; IW-#29), 10 mg/kg (˜200 μg) IL-2(R38D/K43E/E61R)/PD-L2-Fc immunocytokine (constructed in Example 11; IW-#11), or PBS (negative control). A total of three injections (10 mg/kg per injection) were given on days 7, 13, and 19 post-inoculation (indicated by black arrows in FIG. 19). Tumor size was measured every 3 days since the first injection. Mice were sacrificed once tumor size reached over 2000 mm³.

[0703] EMT6 tumor growth is resistant to anti-PD-1 immunotherapy. As can be seen from FIG. 19, all immunomodulatory molecules significantly inhibited EMT6 tumor growth, of which IL-12(E59A/F60A)/anti-PD-1 (IW-#48) and IL-2(R38D/K43E/E61R)/PD-L2-Fc (IW-#11) immunomodulatory molecules demonstrated better efficacy compared to IL-12(E59A/F60A)/PD-L2-Fc (IW-#29) immunomodulatory molecule. The slightly lower efficacy seen in PD-L2-Fc based IL-12 immunomodulatory molecule was likely due to stimulated PD-1 inhibitory immune checkpoint signaling upon PD-L2-PD-1 binding, which created an immunosuppression signal that “balances” against the immunostimulating/pro-inflammatory activity of IL-12.

### Example 20: Position of Cytokine or Variant Thereof within the Immunocytokine Affects Non-Specific Activities of the Immunocytokine

[0704] Two immunomodulatory molecule designs were generated to test whether placement of the cytokine or variant thereof at the hinge region (between antigen-binding domain and Fc fragment; hidden format) or at the C-terminus of the Fc fragment (e.g., C′ of antibody heavy chain; exposed format) could affect the targeted activity of the cytokine or variant thereof. The first design incorporated the cytokine at the hinge region of one heavy chain of an anti-PD-1 antibody (non-agonist): within the hinge region between CH1 and CH2 (the immunomodulatory molecules were named in the format of “IL-12/anti-PD-1”). The second design fused the cytokine to the C-terminus of one heavy chain of an anti-PD-1 antibody (non-agonist) through a linker (the immunomodulatory molecules were named in the format of “anti-PD-1/IL-12”), which is a common design among current immunocytokines.

[0705] IL-12(E59A/F60A)/anti-PD-1 (IW-#48 or construct #48), IL-12(E59A)/anti-PD-1 immunocytokine (IW-#46 or construct #46), and IL-12(G64A)/anti-PD-1 (IW-#47 or construct #47) with IL-12 variant (single-chain N′ to C′ IL-12B (p40 variant)-linker-IL-12A (wt p35)) positioned within the hinge region of one heavy chain of the heterodimeric anti-PD-1 antibody (nivolumab) were constructed as described in Example 1.

[0706] To make the heavy chain C′ cytokine fusion constructs, single-chain IL-12(E59A) variant (SEQ ID NO: 69), single-chain IL-12(G64A) variant (SEQ ID NO: 70), or single-chain IL-12(E59A/F60A) variant (SEQ ID NO: 68) was fused to the C′ of one heavy chain of the heterodimeric anti-PD-1 antibody (nivolumab) via a G/S containing peptide linker. The constructs are hereinafter referred to as anti-PD-1/IL-12(E59A) (construct #46HC′), anti-PD-1/IL-12(G64A) (construct #47HC′), and anti-PD-1/IL-12(E59A/F60A) (construct #48HC′), respectively. The heavy chain non-fusion polypeptide of the heterodimeric anti-PD-1 antibody has sequence of SEQ ID NO: 51. The linker within the single-chain IL-12 variant (e.g., single-chain IL-12(E59A/F60A) variant) can also be changed to SEQ ID NO: 246, for example, the single-chain IL-12(E59A/F60A) variant can comprise SEQ ID NO: 254.

[0707] IL-12 signal transduction assays using HEK-Blue™ IL-12 and HEK-PD-1-IL-12 (generated in-house by overexpressing human PD-1 in HEK-Blue™ IL-12 Cells using a lentiviral vector) cells were similarly conducted as described in Example 1 with two configurations of immunocytokines described above and rIL-12 (positive control).

TABLE 10
IL-12 biological activity of different IL-12immunocytokine formats

| | Location of | IL-12 mutation | | |
|---|---|---|---|---|
| Construct | cytokine | (in p40 subunit) | HEK-IL-12 | HEK-PD-1-IL-12 |
| rIL12 (control) | / | / | 100% | 100% |
| IL-12(G64A)/anti-PD-1 | Hinge of one | G64A | 90% | 230% |
| (construct #47) | heavy chain | | | |
| IL-12(E59A)/anti-PD-1 | | E59A | 5% | 78% |
| (construct #46) | | | | |
| IL-12(E59A/F60A)/anti-PD-1 | | E59A/F60A | <0.2% | 32% |
| (construct #48) | | | | |
| anti-PD-1/IL-12(G64A) | C-terminus | G64A | 85% | 210% |
| (construct #47HC′) | of one heavy | | | |
| anti-PD-1/IL-12(E59A) | chain | E59A | 15% | 86% |
| (construct #46HC′) | | | | |
| anti-PD-1/IL-12(E59A/F60A) | | E59A/F60A | 4% | 37% |
| (construct #48HC′) | | | | |

[0708] In HEK-IL-12 reporter assay, both IL-12 immunomodulatory molecule formats were only able to bind to HEK-IL-12 cells via IL-12 moiety/IL-12 receptor interaction, if the IL-12 moiety was accessible (e.g., heavy chain C′ fusion format). In HEK-PD-1-IL-12 reporter assay, both IL-12 immunomodulatory molecule formats were able to bind to HEK-PD-1-IL-12 cells via both IL-12 moiety/IL-12 receptor interaction, and anti-PD-1 antigen-binding fragment/PD-1 interaction.

[0709] As shown in Table 10, the hinge fusion design had significantly decreased non-specific activity (i.e., cytokine activity in the absence of PD-1 binding) compared to the heavy chain C-terminus fusion design. In PD-1 negative cells (HEK-IL-12), construct #48 showed almost undetectable levels of IL-12 activity (<0.2%), compared to 4% for construct #48HC′. Similar results were observed for construct #47 and construct #47HC′ (5% compared to 15%, respectively). The IL-12 double mutation E59A/F60A also significantly reduced non-specific activity compared to single mutation E59A or G64A. In PD-1 positive cells (HEK-PD-1-IL-12), IL-12 targeted activity was similar between the corresponding hinge fusion format and heavy chain C-terminus fusion format, suggesting that the hinge fusion design does not significantly inhibit IL-12 activity in the presence of antigen-positive cells (or antigen-binding). Taken together, the hinge placement of cytokine (especially certain cytokine variants) can greatly reduce non-specific IL-12 activity in the absence of binding of the antigen-binding domain.

### Example 21: Generation of IL-12/Anti-PD-1 Immunomodulatory Molecules with Reduced Affinity for PD-1

Generation of Anti-PD-1 Antibody Variants with Reduced PD-1 Binding Affinity

[0710] Due to nivolumab's high binding affinity for PD-1, IL-12/anti-PD-1 immunomodulatory molecules using wildtype nivolumab as parental antibody may direct IL-12 activity to all PD-1 positive cells, regardless of PD-1 expression levels. Targeting of such a large population of PD-1 positive cells could result in a cytokine storm or other adverse side effects, from activating any PD-1 positive immune cells (e.g., T cells) by the immunostimulatory cytokine moiety.

[0711] To generate anti-PD-1 mutants (non-agonist Ab) with reduced binding affinity for PD-1, so that it only targets high expressing PD-1 cells (e.g., T cells), mutations were introduced to HC-CDR3 at D100 or N99 positions of nivolumab: HC-CDR3(D100N), HC-CDR3(D100G), HC-CDR3(D100R), HC-CDR3(N99G), HC-CDR3(N99A) and HC-CDR3(N99M). The affinity of these anti-PD-1 antibodies (non-agonist Ab) were measured by Biacore and cell-based assays, calibrated by wildtype nivolumab binding affinity (see Table 11). “N/A” indicates non-detected PD-1 binding.

[0712] To construct anti-PD-1 heterodimer, one heavy chain comprises a hinge region comprising SEQ ID NO: 78, and an Fc domain subunit comprising SEQ ID NO: 97; the other heavy chain comprises a hinge region comprising SEQ ID NO: 77, and an Fc domain subunit comprising SEQ ID NO: 98. The two light chains each comprises the amino acid sequence of SEQ ID NO: 50.

TABLE 11
PD-1 binding affinities of various anti-PD-1 heavy chain
mutants (non-agonist)

| Heavy chain mutation | Affinity to PD-1 (Kd) |
|---|---|
| WT | 2.6 nM |
| D100N | 25 nM |
| D100G | 130 nM |
| D100R | 910 nM |
| N99G | 2300 nM |
| N99A | N/A |
| N99M | N/A |

Construction of IL-12/Anti-PD-1 Immunomodulatory Molecules with Reduced Affinity for PD-1

[0713] Various IL-12/anti-PD-1 immunomodulatory molecules were generated as described in Example 1 by placing single-chain IL-12(E59A/F60A) variant (SEQ ID NO: 68 or 254) within the hinge region of one heavy chain of the various heterodimeric anti-PD-1 mutants (non-agonist) described above. The sequence of the heavy chain cytokine fusion polypeptide is provided in Table 12 for each construct. The corresponding pairing non-fusion heavy chain comprises from N′ to C′ VH (with corresponding HC-CDR3 mutation)-CH1-hinge (SEQ ID NO: 77)-Fc domain subunit (SEQ ID NO: 98).

### IL-12 Signal Transduction Assay

[0714] IL-12 signal transduction assays were similarly conducted as described in Example 1 using IL-12/anti-PD-1(mut) immunomodulatory molecules with reduced PD-1 binding affinity (IL-12(E59A/F60A)/anti-PD-1(wt) and rIL-12 served as control), on HEK-Blue™ IL-12 cells and HEK-PD-1-IL-12 cells. Two variations of HEK-PD-1-IL-12 cells were used: one with high PD-1 expression “HEK-IL-12-PD-1(high)” (as described in Example 1, over-expressing PD-1), and one with 30-fold lower PD-1 expression “HEK-IL-12-PD-1(low)” (generated in-house by expressing lower amount of human PD-1 in HEK-Blue™ IL-12 Cells using a lentiviral vector). Cells were incubated with 20 ng/mL of the various IL-12/anti-PD-1 immunomodulatory molecules (or control) for 24 hours.

### IFN-γ Release Assay

[0715] IFN-γ release assays were similarly conducted as described in Example 13 using the IL-12(E59A/F60A)/anti-PD-1(mut) immunomodulatory molecules with reduced PD-1 binding affinity. IL-12(E59A/F60A)/anti-PD-1(wt) and rIL-12 served as control. Briefly, T cells were activated by incubating PBMCs with an anti-CD3 antibody (OKT3, 100 ng/mL) for three days. PBMCs were washed to remove the anti-CD3 antibody and incubated with 200 ng/mL of the various IL-12(E59A/F60A)/anti-PD-1(mut) immunomodulatory molecules (or control) for 24 hours. After one day, the amount of IFN-γ released into the cell culture medium was measured.

TABLE 12
IL-12 biological activity of IL-12(E59A/F60A)/anti-PD-1 immunomodulatory molecules
comprising various anti-PD-1 heavy chain mutations (reduced PD-1 binding affinity)

| Construct | Affinity | HEK | HEK-IL-12- | HEK-IL-12- | PBMC |
|---|---|---|---|---|---|
| (heavy chain fusion sequence) | PD-1 (Kd) | IL-12 | PD-1 (high) | PD-1 (low) | (IFN-γ ng/ml) |
| rIL-12 | | 100% | 100% | 100% | 2300 |
| IL-12(E59A/F60A)/anti-PD-1(WT) | 2.6 nM | <0.2% | 36% | 38% | 1400 |
| (construct IW-#48; SEQ ID NO: 22) | | | | | |
| IL-12(E59A/F60A)/anti-PD-1(D100N) | 25 nM | <0.2% | 38% | 33% | 820 |
| (SEQ ID NO: 149) | | | | | |
| IL-12(E59A/F60A)/anti-PD- | 130 nM | <0.2% | 33% | 17% | 120 |
| 1(D100G) | | | | | |
| (SEQ ID NO: 150) | | | | | |
| IL-12(E59A/F60A)/anti-PD- | 910 nM | <0.2% | 10% | 3% | 69 |
| 1(D100R) | | | | | |
| (SEQ ID NO: 151) | | | | | |
| IL-12(E59A/F60A)/anti-PD-1(N99G) | 2300 nM | <0.2% | 5% | <0.2% | 34 |
| (SEQ ID NO: 152) | | | | | |
| IL-12(E59A/F60A)/anti-PD-1(N99A) | N/A | <0.2% | 3% | <0.2% | 12 |
| (SEQ ID NO: 153) | | | | | |
| IL-12(E59A/F60A)/anti-PD-1(N99M) | N/A | <0.2% | <0.2% | <0.2% | 13 |
| (SEQ ID NO: 154) | | | | | |

[0716] As can be seen from Table 12, for all immunomodulatory molecules tested, no non-specific IL-12 activity was observed in the absence of anti-PD-1 binding (see HEK-IL-12 column). Their ability of transducing IL-12 signal in the presence of PD-1 binding, as well as their ability in inducing IFN-γ release, decreases as anti-PD-1 binding affinity decreases, demonstrating antigen-binding dependent cytokine activity of the hinge fusion design. IL-12(E59A/F60A)/anti-PD-1 immunomodulatory molecules with D100G, D100R, or N99G mutations in anti-PD-1 heavy chain showed notable differences in binding between high and low PD-1 expressing cells. These results indicate that cells expressing a higher level of PD-1 can be specifically targeted using IL-12(E59A/F60A)/anti-PD-1(mut) immunomodulatory molecules with reduced affinity for PD-1. IFN-γ secretion induced by these constructs were also much lower compared to IL-12/anti-PD-1(wt) immunomodulatory molecule and rIL-12 control.

[0717] Hence, IL-12(E59A/F60A)/anti-PD-1(mut) immunomodulatory molecules described herein, and maybe other immunomodulatory molecules constructed based on antigen-binding domain with reduced antigen binding affinity, may be used to specifically target cells of interest with high-antigen expression, with reduced off-target effect and/or cytokine storm.

### Example 22: Reducing PD-1 Binding Affinity in IL-12/Anti-PD-1 Immunomodulatory Molecules Reduces Toxicity in Mice

[0718] Humanized PD-1 mice (by inserting, within the mouse PD-1 locus, a chimeric PD-1 with a human extracellular domain, a murine transmembrane domain and a murine intracellular domain) derived from the C57 strain (5-6 weeks age, 20 g females) were injected with 10 mg/kg or 50 mg/kg (per injection) of various IL-12(E59A/F60A)/anti-PD-1(mut) immunomodulatory molecules described in Example 21. IL-12(E59A/F60A)/anti-PD-1(wt) immunomodulatory molecule (IW-#48 or construct #48) served as control. A total of four injections were given on Days 0, 4, 8, and 12. Mice were monitored daily for mortality and four toxicity symptoms: i) fur texture, ii) reduced activity, iii) morbidity, and iv) weight loss.

[0719] Mice injected with the IL-12(E59A/F60A)/anti-PD-1(wt) immunomodulatory molecule (IW-#48) comprising wildtype nivolumab showed the greatest toxicity, with all mice in the group dying after receiving either the second or third injection, even for lower dosing. In contrast, mice injected with IL-12(E59A/F60A)/anti-PD-1(mut) immunomodulatory molecules comprising anti-PD-1 with reduced PD-1 binding affinity showed reduced toxicity, with death observed only in the group treated with IL-12(E59A/F60A)/anti-PD-1(D100N). As can be seen from Table 13, the severity of toxicity symptom reduces as PD-1 binding affinity decreases, and/or as the dose decrease, among the constructs.

TABLE 13
In vivo toxicity of IL-12/anti-PD-1 immunomodulatory molecules

| | Affinity | Dose | | |
|---|---|---|---|---|
| Construct | PD-1 (Kd) | (mg/kg) | Toxicity Symptoms | Deaths |
| IL-12(E59A/F60A)/anti-PD-1(WT) | 2.6 nM | 10 | Fur texture, reduced activity, | 5/5 |
| (construct IW-#48) | | | weight loss, morbidity | |
| | | 50 | Fur texture, reduced activity, | 5/5 |
| | | | weight loss, morbidity | |
| IL-12(E59A/F60A)/anti-PD- | 25 nM | 10 | Fur texture, reduced activity, | 3/5 |
| 1(D100N) | | | weight loss, morbidity | |
| | | 50 | Fur texture, reduced activity, | 5/5 |
| | | | weight loss, morbidity | |
| IL-12(E59A/F60A)/anti-PD- | 130 nM | 10 | Fur texture, reduced activity | None |
| 1(D100G) | | 50 | Fur texture, reduced activity | None |
| IL-12(E59A/F60A)/anti-PD-1(D100R) | 910 nM | 10 | Fur texture (moderate) | None |
| | | 50 | Fur texture, reduced activity | None |
| IL-12(E59A/F60A)/anti-PD-1(N99G) | 2300 nM | 10 | None | None |
| | | 50 | Fur texture (moderate) | None |
| IL-12(E59A/F60A)/anti-PD-1(N99M) | N/A | 10 | None | None |
| | | 50 | Fur texture (moderate) | None |

[0720] Due to wildtype nivolumab's (non-agonist) high binding affinity to PD-1 (K_{d}≈10⁻⁸-10⁻⁹ M), IL-12(E59/F60A)/anti-PD-1(WT) most likely binds and stimulates (via the cytokine activity) any PD-1 positive cell. This would include activated T-cells and NK cells, which would result in cytokine release syndrome. In contrast, IL-12/anti-PD-1 based immunomodulatory molecules with reduced binding affinity to hPD-1 can only bind a smaller population of PD-1 positive cells, particularly cells with very high PD-1 expression levels, such as exhausted T-cells. The data shown here is consistent with the data from the in vitro PBMC IFN-γ release assay in Example 21. These findings indicate that reducing the PD-1 binding affinity of anti-PD-1 antigen-binding domain (non-agonist anti-PD-1) to a K_{d} of between about 10⁻⁶-10⁻⁷ M (see, e.g., D100G, D100R, N99G in anti-PD-1 heavy chain) can greatly improve the safety of IL-12/anti-PD-1 immunomodulatory molecules, while retaining therapeutic efficacy.

### Example 23: Increasing the Binding Affinity of PD-L1 and PD-L2 does not Increase Toxicity of IL-12/PD-L1-Fc and IL-12/PD-L2-Fc Immunomodulatory Molecules

[0721] As shown in Examples 10, 18, and 19, replacing anti-PD-1 antigen-binding fragment (not agonist Ab) with PD-L2 extracellular domain in IL-12-based immunomodulatory molecules can significantly reduce toxicity, likely due to stimulated PD-1 inhibitory immune checkpoint signaling upon PD-L2-PD-1 binding, which created an immunosuppression signal that “balances” against the immunostimulating/pro-inflammatory activity of IL-12. To investigate if safety profiles of these “balancing” constructs can be further improved, IL-12 immunomodulatory molecules comprising PD-L1 or PD-L2 extracellular domain with increased PD-1 binding affinity were constructed, in order to enhance PD-1 immunosuppression signal.

Generation of PD-L1 Variants with Increased PD-1 Binding Affinity

[0722] Wildtype PD-L1 has a binding affinity for PD-1 of about 10⁻⁵-10⁻⁶ M, which is lower than that of nivolumab (K_{d}≈10⁻⁸-10⁻⁹ M). To increase the affinity for PD-1, PD-L1 mutants were generated. Mutations were introduced into the extracellular domain of wildtype PD-L1 with amino acid positions relative to SEQ ID NO; 120. These mutant PD-L1 extracellular domains were then fused to an Fc fragment via a hinge region to construct parental PD-L I-Fc constructs. To construct PD-L1-Fc heterodimer, one polypeptide chain comprises a hinge region comprising SEQ ID NO: 88, and an Fc domain subunit comprising SEQ ID NO: 97; the other polypeptide chain comprises a hinge region comprising SEQ ID NO: 87, and an Fc domain subunit comprising SEQ ID NO: 98. Mutation constructs were named in the format of PD-L1(mut)-Fc.

[0723] A description of the mutations made and PD-1 binding affinities (measured in PD-L1-Fc format) are shown in Table 14. Binding affinity for each PD-L1(mut)-Fc was calibrated based on PD-L1(wt)-Fc binding affinity. N/A indicates non-detectable PD-1 binding. These results indicate that all PD-L1(mut) achieved about 4-60 fold increase in PD-1 binding affinity compared to wildtype PD-L1. Among these, PD-L1(I54Q/E58M/R113T/M115L/S117A/G119K) (PD-L1(mut2)), PD-L1(I54Q/E58M/R113T/M115L/G119K) (PD-L1(mut6)), and PD-L1(I54Q/E58M/R113T/M115L/S117A) (PD-L1(mut7)) showed the highest fold increase in affinity for PD-1 as compared to wildtype PD-L1.

TABLE 14
PD-1 binding affinities of various PD-L1 mutants

| | Affinity (Kd) | Affinity (Kd) |
|---|---|---|
| PD-L1 mutations | human PD-1 | mouse PD-1 |
| None | 7500 nM | 5100 nM |
| (PD-L1(WT); SEQ ID NO: 121) | | |
| E58M/R113T/M115L/S117A/G119K | N/A | N/A |
| (PD-L1(mut1); SEQ ID NO: 122) | | |
| I54Q/E58M/R113T/M115L/S117A/G119K | 150 nM | 120 nM |
| (PD-L1(mut2); SEQ ID NO: 123) | | |
| I54Q/R113T/M115L/S117A/G119K | 910 nM | 820 nM |
| (PD-L1(mut3); SEQ ID NO: 124) | | |
| I54Q/E58M/M115L/S117A/G119K | 1090 nM | 980 nM |
| (PD-L1(mut4); SEQ ID NO: 125) | | |
| I54Q/E58M/R113T/S117A/G119K | 1203 nM | 1100 nM |
| (PD-L1(mut5); SEQ ID NO: 126) | | |
| I54Q/E58M/R113T/M115L/G119K | 555 nM | 420 nM |
| (PD-L1(mut6); SEQ ID NO: 127) | | |
| 154Q/E58M/R113T/M115L/S117A | 98 nM | 110 nM |
| (PD-L1(mut7); SEQ ID NO: 128) | | |

Generation of PD-L2 Variants with Increased PD-1 Binding Affinity

[0724] PD-L2 has a binding affinity for PD-1 of about 10⁻⁶-10⁻⁷ M, which is lower than that of nivolumab (K_{d}≈10⁻⁸-10⁻⁹ M). To increase the affinity for PD-1, PD-L2 mutants were generated. Mutations were introduced into the extracellular domain of wildtype PD-L2 with amino acid positions relative to SEQ ID NO: 105. These mutant PD-L2 extracellular domains were then fused to an Fc fragment via a hinge region to construct parental PD-L2-Fc constructs. To construct PD-L2-Fc heterodimer, one polypeptide chain comprises a hinge region comprising SEQ ID NO: 88, and an Fc domain subunit comprising SEQ ID NO: 97; the other polypeptide chain comprises a hinge region comprising SEQ ID NO: 87, and an Fc domain subunit comprising SEQ ID NO: 98. Mutation constructs were named in the format of PD-L2(mut)-Fc.

[0725] A description of the mutations made and PD-1 binding affinities (measured in PD-L2-Fc format) are shown in Table 15. Binding affinity for each PD-L2(mut)-Fc was calibrated based on PD-L2(wt)-Fc binding affinity. These results indicate that all PD-L2(mut) achieved about 2-5 fold increase in PD-1 binding affinity compared to wildtype PD-L2. Among these, PD-L2(S58V) (PD-L2(mut2)) and PD-L2(T56V/S58V/Q60L) (PD-L2(mut4)) showed the highest fold increase in affinity for PD-1 as compared to wildtype PD-L2.

TABLE 15
PD-1 binding affinities of various PD-L2 mutants

| | Affinity (Kd) | Affinity (Kd) |
|---|---|---|
| PD-L2 Mutations | human PD-1 | mouse PD-1 |
| None | 1200 nM | 980 nM |
| (PD-L2(WT); SEQ ID NO: 106) | | |
| T56V | 520 nM | 430 nM |
| (PD-L2(mut1); SEQ ID NO: 107) | | |
| S58V | 350 nM | 230 nM |
| (PD-L2(mut2); SEQ ID NO: 108) | | |
| Q60L | 490 nM | 320 nM |
| (PD-L2(mut3); SEQ ID NO: 109) | | |
| T56V/S58V/Q60L | 255 nM | 220 nM |
| (PD-L2(mut4); SEQ ID NO: 110) | | |

Construction of IL-12/PD-L1-Fc and IL-12/PD-L2-Fc Immunomodulatory Molecules with Increased Affinity for PD-1

[0726] Similarly as described in Example 10, heterodimeric PD-L1(mut)-Fc or PD-L2(mut)-Fc generated herein were used as parental antigen-binding proteins to construct IL-12 immunomodulatory molecules that bind PD-1. Single chain IL-12(E59A/F60A) variant (e.g., SEQ ID NO: 68 or 254) was placed at the N′ of the hinge of one polypeptide chain within the parental PD-L1(mut)-Fc or PD-L2(mut)-Fc heterodimers.

[0727] IL-12(E59A/F60A)/PD-L2(wt)-Fc immunomodulatory molecule (“construct #29” or “IW-#29”) was constructed as in Example 2 with wildtype PD-L2 extracellular domain. IL-12(E59A/F60A)/PD-L2(mut)-Fc immunocytokine comprises one IL-12 fusion polypeptide (from N′ to C′: PD-L2(mut) extracellular domain-GGGGSGGG linker (SEQ ID NO: 244)-single chain IL-12(E59A/F60A) variant (e.g., SEQ ID NO: 68 or 254)-GGGGSGGG linker (SEQ ID NO: 244)-hinge (SEQ ID NO: 88)-Fc domain subunit (SEQ ID NO: 97)); and one pairing polypeptide (from N′ to C′: PD-L2(mut) extracellular domain-GGGGSGGG linker (SEQ ID NO: 244)-hinge (SEQ ID NO: 87)-Fc domain subunit (SEQ ID NO: 98)). Exemplary IL-12 cytokine fusion chain of IL-12(E59A/F60A)/PD-L2(mut)-Fc immunomodulatory molecules can comprise SEQ ID NO: 167 or 168.

[0728] IL-12(E59A/F60A)/PD-L1(wt)-Fc immunomodulatory molecule comprises one IL-12 fusion polypeptide (from N′ to C′: PD-L1(wt) extracellular domain (SEQ ID NO: 121)-GGGGSGGG linker (SEQ ID NO: 244)-single chain IL-12(E59A/F60A) variant-GGGGSGGG linker (SEQ ID NO: 244)-hinge (SEQ ID NO: 88)-Fc domain subunit (SEQ ID NO: 97)); and one pairing polypeptide (from N′ to C′: PD-L1(wt) extracellular domain (SEQ ID NO: 121)-GGGGSGGG linker (SEQ ID NO: 244)-hinge (SEQ ID NO: 87)-Fc domain subunit (SEQ ID NO: 98)). IL-12(E59A/F60A)/PD-L1(mut)-Fc immunomodulatory molecule comprises one IL-12 fusion polypeptide (from N′ to C′: PD-L1(mut) extracellular domain (e.g., SEQ ID NO: 129)-GGGGSGGG linker (SEQ ID NO: 244)-single chain IL-12(E59A/F60A) variant-GGGGSGGG linker (SEQ ID NO: 244)-hinge (SEQ ID NO: 88)-Fc domain subunit (SEQ ID NO: 97)); and one pairing polypeptide (from N′ to C′: PD-L1(mut) extracellular domain-GGGGSGGG linker (SEQ ID NO: 244)-hinge (SEQ ID NO: 87)-Fc domain subunit (SEQ ID NO: 98)). The linkers can be changed to other linkers (e.g., GSG linker; SEQ ID NO: 203) or can be optional. Exemplary IL-12 cytokine fusion chain of IL-12(E59A/F60A)/PD-L1(mut)-Fc immunomodulatory molecules can comprise SEQ ID NO: 155 or 156.

[0729] To test the safety profiles of the IL-12-based immunomodulatory molecules constructed with increased affinity to PD-1, wildtype C57 mice (5-6 weeks age, 20 g females) were injected with 10 mg/kg or 50 mg/kg (per injection) of IL-12(E59A/F60A)/PD-L1(mut2)-Fc immunomodulatory molecule or IL-12(E59A/F60A)/PD-L2(mut2)-Fc immunomodulatory molecule, as these two constructs showed similar PD-1 binding affinity to both human and mouse PD-1 (˜10⁻⁷ M). IL-12(E59A/F60A)/PD-L1(wt)-Fc immunomodulatory molecule or IL-12(E59A/F60A)/PD-L2(wt)-Fc immunomodulatory molecule served as control. A total of four injections were given on Days 0, 4, 8, and 12. Mice were monitored daily for mortality and four toxicity symptoms: i) fur texture, ii) reduced activity, iii) morbidity, and iv) weight loss.

[0730] As can be seen from Table 16, increasing binding affinity to PD-1 does not significantly affect the safety profiles of IL-12(E59A/F60A)/PD-L1-Fc immunomodulatory molecule or IL-12(E59A/F60A)/PD-L2-Fc immunomodulatory molecule. These results show that IL-12 immunomodulatory molecules comprising mutant versions of PD-L1 and PD-L2 with increased binding affinities to PD-1 retain the safety profile of wildtype IL-12/PD-L1-Fc and IL-12/PD-L2-Fc immunomodulatory molecules. This may be applied to other PD-L1-Fc or PD-L2-Fc based immunomodulatory molecules as well, to construct other immunomodulatory molecules (e.g., IL-2 immunomodulatory molecules).

TABLE 16
In vivo toxicity of IL-12/PD-L2-Fc immunomodulatory molecules

| Construct | Affinity | Dose | Toxicity | Deaths in |
|---|---|---|---|---|
| (cytokine fusion chain sequence) | (Kd) mPD-1 | (mg/kg) | Symptoms | group |
| IL-12(E59A/F60A)/PD-L1(WT)-Fc | 5100 nM | 10 | None | None |
| | | 50 | None | None |
| IL-12(E59A/F60A)/PD-L1 | 120 nM | 10 | None | None |
| (I54Q/E58M/R113T/M115L/S117A/G119K)-Fc | | 50 | Fur texture | None |
| (“IL-12(E59A/F60A)/PD-L1 | | | (moderate) | |
| (mut2)-Fc”; SEQ ID NO: 155) | | | | |
| IL-12(E59A/F60A)/PD-L2(WT)-Fc | 980 nM | 10 | None | None |
| (construct IW-#29; SEQ ID NO: 17) | | 50 | None | None |
| IL-12(E59A/F60A)/PD-L2(S58V)-Fc | 230 nM | 10 | None | None |
| (IL-12(E59A/F60A)/PD-L2(mut2)-Fc; SEQ | | 50 | None | None |
| ID NO: 167) | | | | |

### Example 24: Generation of IL-2/PD-L1-Fc Immunomodulatory Molecules with IL-2 Biological Activity Directed to PD-1-Positive Cells

[0731] Certain cytokines have synergistic action, such as IL-12 and IL-2, IL-12 and IFN-γ. To reduce toxicity of IL-2 and immunomodulatory molecules thereof, two sets of IL-2 mutations were generated: mutations within IL-2 domain that interacts with IL2Ra (CD25) (R38D/K43E/E61R; SEQ ID NO: 26), and mutations within IL-2 domain that interacts with IL2Ry (CD132) (L18R, Q22E, Q126T, S130R, or any combinations thereof). See Table 17.

[0732] Heterodimeric PD-L1(mut2)-Fc immunomodulatory molecule was used as the parental PD-1 binding protein. First polypeptide chain comprises SEQ ID NO: 132 (N′ to C′: PD-L1(mut2) extracellular domain (SEQ ID NO: 123)-GGGGSGGG linker (SEQ ID NO: 244)-hinge (SEQ ID NO: 88)-Fc domain subunit (SEQ ID NO: 97)), second polypeptide chain comprises SEQ ID NO: 134 (N′ to C′: PD-L1(mut2) extracellular domain (SEQ ID NO: 123)-GGGGSGGG linker (SEQ ID NO: 244)-hinge (SEQ ID NO: 87)-Fc domain subunit (SEQ ID NO: 98)). To construct IL-2 immunomodulatory molecules, IL-2 variant was placed between the PD-L1(mut2) extracellular domain and the hinge. Briefly, IL-2(mut)/PD-L1(mut2)-Fc immunocytokine comprises one IL-2 fusion polypeptide (from N′ to C′: PD-L1(mut2) extracellular domain (SEQ ID NO: 123)-GGGSG linker (SEQ ID NO: 209)-IL-2(mut) variant-GGGGSGGG linker (SEQ ID NO: 244)-hinge (SEQ ID NO: 87)-Fc domain subunit (SEQ TD NO: 98)); and one pairing polypeptide SEQ ID NO: 132.

[0733] PD-L1(mut)-Fc immunomodulatory molecules comprising other PD-L1(mut) extracellular domain and/or cytokine moiety (e.g., other IL-2 variants) can be similarly constructed. For example, PD-L1(mut7)-Fc immunomodulatory molecules can be constructed by replacing PD-L1(mut2) extracellular domain with PD-L1(mut7) extracellular domain (SEQ ID NO: 128). Parental heterodimeric PD-L1(mut7)-Fc immunomodulatory molecule can comprising one chain of SEQ ID NO: 133, and the other chain of SEQ ID NO: 135. Exemplary IL-2 cytokine fusion chain of IL-2(mut)/PD-L1(mut7)-Fc immunomodulatory molecules can comprise any of SEQ ID NOs: 163-166, the pairing non-cytokine fusion chain can comprise 133.

[0734] HEK-Blue™ IL-2 Cells and HEK-PD-1-IL-2 cells were used to assess TL-2 signal activation activity of the constructs, as described in Example 12. As can be seen from Table 17, IL-2(R38D/K43E/E61R)/PD-L1(mut2)-Fc with IL-2 mutations only in CD25 binding domain (R38D/K43E/E61R) (see construct comprising SEQ ID NO: 179 chain) still retained about 16% IL-2 activity based on HEK-IL-2 assay (no PD-1 binding), while IL-2 immunomodulatory molecules further carrying IL-2 mutations in the CD132 binding domain significantly decreased IL-2 activity based on HEK-IL-2 assay, in the absence of PD-1 binding. Notably, IL-2 activity of some of the IL-2 immunomodulatory molecules further carrying CD132 binding domain mutations (see constructs comprising SEQ ID NO: 159, SEQ ID NO: 160, or SEQ ID NO: 161 chain) can be partially rescued when binding to PD-1 (based on HEK-IL-2-PD-1 assay). S130 may be crucial for IL-2 activity, as IL-2 immunomodulatory molecule further carrying S130R mutation in CD132 binding domain (see construct comprising SEQ ID NO: 162 chain), in combination with other IL-2 mutations, failed to exhibit any IL-2 activity even in the presence of PD-1 binding.

TABLE 17
IL-2 biological activity of IL-2/PD-L1-Fc immunomodulatory molecules

| | Non-fusion | IL-2 fusion or | | | | | |
|---|---|---|---|---|---|---|---|
| | polypeptide | non-fusion | IL-2 | CD25 | CD132 | | |
| | PD- | polypeptide PD- | SEQ | binding | binding | | HEK- |
| | L1(mut2)-Fc | L1(mut2)-Fc | ID | site | site | HEK- | IL-2- |
| Construct | SEQ ID NO: | SEQ ID NO: | NO: | mutations | mutations | IL-2 | PD-1 |
| rIL2 | / | / | | / | / | 100% | 100% |
| PD-L1(mut2)-Fc | 132 | 134 | / | / | / | <0.1% | <0.1% |
| IL-2(R38D/ | 132 | 179 | 26 | R38D/ | / | 16% | 76% |
| K43E/E61R)/PD- | | | | K43E/ | | | |
| L1(mut2)-Fc | | | | E61R | | | |
| IL-2(L18R/Q22E/ | 132 | 159 | 27 | R38D/ | L18R/ | 4% | 35% |
| R38D/K43E/E61R)/ | | | | K43E/ | Q22E | | |
| PD-L1(mut2)-Fc | | | | E61R | | | |
| IL-2(R38D/K43E/ | 132 | 160 | 28 | R38D/ | Q126T | 2% | 20% |
| E61R/Q126T)/ | | | | K43E/ | | | |
| PD-L1(mut2)-Fc | | | | E61R | | | |
| IL-2(L18R/Q22E/ | 132 | 161 | 29 | R38D/ | L18R/ | <0.1% | 5% |
| R38D/K43E/E61R/ | | | | K43E/ | Q22E/ | | |
| Q126T)/PD- | | | | E61R | Q126T | | |
| L1(mut2)-Fc | | | | | | | |
| IL-2(L18R/Q22E/ | 132 | 162 | 30 | R38D/ | L18R/ | <0.1% | <0.1% |
| R38D/K43E/E61R/ | | | | K43E/ | Q22E/ | | |
| Q126T/S130R)/ | | | | E61R | Q126T/ | | |
| PD-L1(mut2)-Fc | | | | | S130R | | |

### Example 25: Generation of IL-2/IL-12/PD-L1 Immunomodulatory Molecules with IL-2 and IL-12 Biological Activity Directed to PD-1-Positive Cells

[0735] Certain cytokines have synergistic action, such as IL-12 and IL-2. As shown in Examples above, IL-12(E59A/F60A)/PD-L1-Fc immunomodulatory molecule (hinge region) showed PD-1 binding dependent IL-12 activity. To investigate whether immunomodulatory molecules can be constructed with synergistic IL-12 and IL-2 activity, while retaining PD-1 binding dependent cytokine activity, different configurations of immunomodulatory molecules were constructed. Heterodimeric PD-L1(mut2)-Fc was used as parental PD-1 binding fusion protein (constructed in Example 23). Set I: one polypeptide chain comprises single chain IL-12(E59A/F60A) polypeptide positioned at the hinge region of PD-L1(mut2)-Fc (see SEQ ID NO: 155 constructed in Example 23); the pairing polypeptide chain does not comprise IL-2 moiety (control; SEQ ID NO: 134 constructed in Examples 23 and 24), or comprises IL-2 variant (either with L18R/Q22E/R38D/K43E/E61R mutation (SEQ ID NO: 27), or with R38D/K43E/E61R/Q126T mutation (SEQ ID NO: 28)) positioned at the hinge region of PD-L1(mut2)-Fc. These immunomodulatory molecules are named in the format of IL-2/IL-12(E59A/F60A)/PD-L1(mut2)-Fc. See FIG. 14A for exemplary structure. Set II: one polypeptide chain comprises IL-12(E59A/F60A) fused to the C′ of PD-L1(mut2)-Fc via GGGGSGGG linker (see SEQ ID NO: 157); the pairing polypeptide chain does not comprise IL-2 moiety (control; SEQ ID NO: 134 constructed in Examples 23 and 24), or comprises TL-2 variant (either with L18R/Q22E/R38D/K43E/E61R mutation (SEQ ID NO: 27), or with R38D/K43E/E61R/Q126T mutation (SEQ ID NO: 28)) positioned at the hinge region of PD-L1(mut2)-Fc. These immunomodulatory molecules are named in the format of IL-2/PD-L1(mut2)-Fc/IL-12(E59A/F60A), indicating that IL-12 moiety is at the C′ of Fc. See FIG. 15A for exemplary structure. See Table 18 for construct sequences.

[0736] HEK-Blue™ IL-2 Cells and HEK-PD-1-IL-2 cells were used to assess IL-2 signal activation activity of the constructs, as described in Example 12. HEK-Blue™ IL-12 Cells and HEK-PD-1-IL-12 cells were used to assess IL-12 signal activation activity of the constructs, as described in Example 1.

[0737] As can be seen from Table 18, IL-12(E59A/F60A)/PD-L1(mut2)-Fc (hinge fusion) did not have detectable IL-12 activity in the absence of PD-1 binding, while PD-1 binding rescued the IL-12 activity to 24%. When IL-12(E59A/F60A) was placed at C′ of Fc as PD-L1(mut2)-Fc/IL-12(E59A/F60A), IL-12 activity was about 1%-2% in the absence of PD-1 binding, and IL-12 activity was further rescued by PD-1 binding (˜25%), to similar extent as the IL-12 hinge fusion.

[0738] By adding on L-2 in the pairing chain at the hinge region, for both IL-12 hinge fusion and C′ fusion formats, IL-2 activity was about 2% H4% in the absence of PD-1 binding, but was rescued to about 20%-35% by PD-1 binding.

[0739] These data indicate that IL-12 and IL-2 can both retain PD-1-binding dependent activity when constructed in trispecific immunomodulatory molecule format. Further, IL-12 and IL-2 moieties did not have significant negative impact on each other's activity.

TABLE 18
IL-2 and IL-12 biological activity of IL-2/IL-12/PD-L1-Fc immunomodulatory
molecules and IL-2/PD-L1-Fc/IL-12 immunomodulatory molecules

| | | IL-2 fusion or | | | | |
|---|---|---|---|---|---|---|
| | IL-12 fusion | non-fusion | | HEK- | | HEK- |
| | polypeptide | polypeptide | | IL-2- | HEK- | IL-12- |
| Construct | SEQ ID NO: | SEQ ID NO: | HEK-IL-2 | PD-1 | IL-12 | PD-1 |
| rIL-2 | / | / | 100% | 100% | / | / |
| rIL-12 | / | / | / | / | 100% | 100% |
| IL-12(E59A/F60A)/PD- | 155 | 134 | <0.1% | <0.1% | <0.2% | 24% |
| L1(mut2)-Fc | (IL-12 hinge) | (no IL-2) | | | | |
| IL-2(L18R/Q22E/ | 155 | 159 | 4% | 35% | <0.2% | 19% |
| R38D/K43E/E61R)/ | (IL-12 hinge) | | | | | |
| IL-12(E59A/F60A)/ | | | | | | |
| PD-L1(mut2)-Fc | | | | | | |
| IL-2(R38D/K43E/ | 155 | 160 | 2% | 20% | <0.2% | 25% |
| E61R/Q126T)/ | (IL-12 hinge) | | | | | |
| IL-12(E59A/F60A)/ | | | | | | |
| PD-L1(mut2)-Fc | | | | | | |
| PD-L1(mut2)-Fc/IL- | 157 | 134 | <0.1% | <0.1% | 1% | 25% |
| 12(E59A/F60A) | (IL-12 at C′) | (no IL-2) | | | | |
| IL-2(L18R/Q22E/ | 157 | 159 | 3% | 32% | 2% | 27% |
| R38D/K43E/E61R)/ | (IL-12 at C′) | | | | | |
| PD-L1(mut2)-Fc/ | | | | | | |
| IL-12(E59A/F60A) | | | | | | |
| IL-2(R38D/K43E/ | 157 | 160 | 3% | 31% | 1% | 30% |
| E61R/Q126T)/ | (IL-12 at C′) | | | | | |
| PD-L1(mut2)-Fc/IL- | | | | | | |
| 12(E59A/F60A) | | | | | | |

### Example 26: Placing IL-12 Moiety at the Hinge Region can Greatly Improve Safety Profiles of IL-12/PD-L1-Fc Immunomodulatory Molecules and IL-2/IL-12/PD-L1-Fc Immunomodulatory Molecules

[0740] PD-L1(mut2)-Fc constructed in Examples 23 and 24 was used as parental PD-1 binding fusion protein, as it showed similar PD-1 binding affinity in both human and mice.

[0741] To test safety profiles in vivo, a mouse single-chain IL-12 variant (SEQ ID NO: 72) with E59A/F60A mutations in the p40 subunit and a p35 wildtype subunit was similarly constructed as described herein: from N′ to C′ p40(E59A/F60A)-GGPGGGGSGGGSGGGG linker (SEQ ID NO: 245)-p35(wt). Two sets of IL-12 fusion polypeptides were constructed, similar to Example 25. Set I: one polypeptide chain comprises single chain mIL-12(E59A/F60A) polypeptide positioned at the hinge region of PD-L1(mut2)-Fc (see SEQ ID NO: 180); the pairing polypeptide chain does not comprise IL-2 moiety (control; SEQ ID NO: 134 constructed in Examples 23 and 24), or comprises IL-2 variant (with R38D/K43E/E61R mutation (SEQ ID NO: 26), L18R/Q22E/R38D/K43E/E61R mutation (SEQ ID NO: 27), or with R38D/K43E/E61R/Q126T mutation (SEQ ID NO: 28)) positioned at the hinge region of PD-L1(mut2)-Fc. These immunomodulatory molecules are named in the format of IL-2/IL-12(E59A/F60A)/PD-L1(mut2)-Fc. See FIG. 14A for exemplary structure. Set II: one polypeptide chain comprises single-chain mIL-12(E59A/F60A) fused to the C′ of PD-L1(mut2)-Fc via GGGGSGGG linker (see SEQ TD NO: 157); the pairing polypeptide chain does not comprise IL-2 moiety (control; SEQ ID NO: 134 constructed in Examples 23 and 24), or comprises IL-2 variant (with R38D/K43E/E61R mutation (SEQ ID NO: 26), with L18R/Q22E/R38D/K43E/E61R mutation (SEQ ID NO: 27), or with R38D/K43E/E61R/Q126T mutation (SEQ ID NO: 28)) positioned at the hinge region of PD-L1(mut2)-Fc. These immunomodulatory molecules are named in the format of IL-2/PD-L1(mut2)-Fc/IL-12(E59A/F60A), indicating that IL-12 moiety is at the C′ of Fc. See FIG. 15A for exemplary structure. See Table 7 for construct sequences. A Control Set did not have any IL-12 moiety fusion to PD-L1(mut2)-Fc (SEQ ID NO: 132).

[0742] To test safety profiles of these constructs, wild-type C57 mice (5-6 weeks age, weight 20g, female) were injected with PBS (control), or the immunomodulatory molecules (10 mg/kg per injection) described herein. A total of 4 injections were given every 4 days. Mice were monitored for death and toxicity symptoms, such as fur texture, reduced activity, and weight loss. 48 hours after the 2^{nd} injection, blood was collected and serum concentrations of IFN-γ was measured.

[0743] As shown in Table 19, immunomodulatory molecules comprising IL-2 additional mutations in CD132 binding domain (L18R/Q22E, or Q126T) in addition to R38D/K43E/E61R in CD25 binding domain, showed much greater safety profiles compared to those without CD132 binding domain mutations (see constructs comprising SEQ ID NO: 179 chain), irrespective of if the IL-12 moiety is at C′ or at hinge.

[0744] As shown in Table 19, immunomodulatory molecules with IL-12 at the C′ of Fc, IL-2(mut)/PD-L1(mut2)-Fc/mIL-12(E59A/F60A) showed higher toxicity compared to IL-12 positioned at hinge region (IL-2(mut)/mIL-12(E59A/F60A)/PD-L1(mut2)-Fc). IL-2(mut)/PD-L1(mut2)-Fc/mIL-12(E59A/F60A) also induced much higher (20-30 folds) cytokine release (see IFN-γ level) compared to IL-12 hinge fusion design.

[0745] Taken together, our in vivo and in vitro data presented herein suggested that immunomodulatory molecules with cytokine (e.g., immunostimulatory cytokines such as IL-12 or variant thereof) positioned at the hinge region can significantly improve the safety profile, even when more cytokines with synergistic actions are present in the same construct (e.g., IL-2/IL-12/PD-L1-Fc). Mutations in cytokines to reduce their immunostimulatory activities, and/or mutations in antigen-binding domain (e.g., anti-PD-1 or PD-L1, or PD-L2), can further improve safety and/or therapeutic efficacy of the constructs.

TABLE 19
IL-2 and IL-12 biological activity of IL-2/IL-12/PD-L1-Fc immunomodulatory molecules
and IL-2/PD-L1-Fc/IL-12 immunomodulatory molecules

| | IL-12 fusion | IL-2 fusion or | | | |
|---|---|---|---|---|---|
| | or non-fusion | non-fusion | | Deaths | |
| | polypeptide | polypeptide | Toxicity | in | Blood |
| Construct | SEQ ID NO: | SEQ ID NO: | Symptoms | group | IFN-γ |
| PBS | / | / | None | None | 5 pg/ml |
| PD-L1(mut2)-Fc | 132 | 134 | None | None | 6 pg/ml |
| | (no IL-12) | (no IL-2) | | | |
| IL-2(R38D/K43E/E61R)/PD- | | 179 | Fur texture, | None | 45 pg/ml |
| L1(mut2)-Fc | | | reduced activity | | |
| IL- | | 159 | None | None | 32 pg/ml |
| 2(L18R/Q22E/R38D/K43E/E61R)/ | | | | | |
| PD-L1(mut2)-Fc | | | | | |
| IL- | | 160 | None | None | 24 pg/ml |
| 2(R38D/K43E/E61R/Q126T)/PD- | | | | | |
| L1(mut2)-Fc | | | | | |
| mIL-12(E59A/F60A)/PD- | 180(mIL-12 at | 134 | None | None | 80 pg/ml |
| L1(mut2)-Fc | hinge) | (no IL-2) | | | |
| IL-2(R38D/K43E/E61R)/mIL- | | 179 | Fur texture, | None | 90 pg/ml |
| 12(E59A/F60A)/PD-L1(mut2)-Fc | | | reduced activity | | |
| IL- | | 159 | None | None | 64 pg/ml |
| 2(L18R/Q22E/R38D/K43E/E61R)/ | | | | | |
| mIL-12(E59A/F60A)/PD- | | | | | |
| L1(mut2)-Fc | | | | | |
| IL- | | 160 | None | None | 45 pg/ml |
| 2(R38D/K43E/E61R/Q126T)/mIL- | | | | | |
| 12(E59A/F60A)/PD-L1(mut2)-Fc | | | | | |
| PD-L1(mut2)-Fc/mIL- | 181 | 134 | Fur texture | None | 1400 pg/ml |
| 12(E59A/F60A) | (mIL-12 at C′) | (no IL-2) | (moderate) | | |
| IL-2(R38D/K43E/E61R)/PD- | | 179 | Fur texture, | 1/5 | 5600 pg/ml |
| L1(mut2)-Fc/mIL-12(E59A/F60A) | | | reduced activity | | |
| IL- | | 159 | Fur texture, | None | 1800 pg/ml |
| 2(L18R/Q22E/R38D/K43E/E61R)/ | | | reduced activity | | |
| PD-L1(mut2)-Fc/mIL- | | | | | |
| 12(E59A/F60A) | | | | | |
| IL- | | 160 | Fur texture | None | 2100 pg/ml |
| 2(R38D/K43E/E61R/Q126T)/PD- | | | (moderate) | | |
| L1(mut2)-Fc/mIL-12(E59A/F60A) | | | | | |

### Example 27: Generation of IL-12/IFN-γ/PD-L1-Fc Immunomodulatory Molecules with IL-12 and IFN-γ Biological Activity Directed to PD-1-Positive Cells

[0746] Certain cytokines have synergistic action, such as IL-12 and IFN-γ. To investigate whether immunomodulatory molecules can be constructed with synergistic IL-12 and IFN-γ activity while retaining PD-1 binding dependent cytokine activity, different configurations of immunomodulatory molecules were constructed using heterodimeric PD-L1-Fc or heterodimeric PD-L2-Fc as the parental PD-1 binding protein.

### Construction of IL-12/IFN-γ/PD-L1-Fc Immunomodulatory Molecules

[0747] Heterodimeric PD-L1(mut2)-Fc and PD-L1(mut7)-Fc immunomodulatory molecules were used as the parental PD-1 binding protein (constructed in Examples 23 and 24). Heterodimeric PD-L1(mut2)-Fc has a first polypeptide chain comprising SEQ ID NO: 132, and a second polypeptide chain comprising SEQ ID NO: 134. Heterodimeric PD-L1(mut7)-Fc has a first polypeptide chain comprising SEQ ID NO: 133, and a second polypeptide chain comprising SEQ ID NO: 135.

[0748] To construct IL-12/IFN-γ/PD-L1-Fc immunomodulatory molecules, one polypeptide chain comprises no IL-12 (as control; SEQ ID NO: 132), or a single chain IL-12(E59A/F60A) polypeptide positioned at the hinge region of PD-L1(mut)-Fc (see, e.g., SEQ ID NO: 155); the pairing polypeptide chain comprises a single chain IFN-γ(A23V/A23V) homodimer positioned at the hinge region of PD-L1(mut)-Fc (from N′ to C′: PD-L1(mut) extracellular domain-GGGSG linker (SEQ ID NO: 209)-single chain IFN-γ(A23V/A23V) homodimer (SEQ ID NO: 47 or 252)-GGGGSGGG linker (SEQ ID NO: 244)-hinge (SEQ ID NO: 87)-Fc domain subunit (SEQ ID NO: 98)).

### Construction of IL-12/IFN-γ/PD-L2-Fc Immunomodulatory Molecules

[0749] Heterodimeric PD-L2(mut2)-Fc and PD-L2(mut4)-Fc immunomodulatory molecules were used as the parental PD-1 binding protein (constructed in Example 23). Heterodimeric PD-L2(mut2)-Fc has a first polypeptide chain comprising SEQ ID NO: 116, and a second polypeptide chain comprising SEQ ID NO: 118. Heterodimeric PD-L2(mut4)-Fc has a first polypeptide chain comprising SEQ ID NO: 117, and a second polypeptide chain comprising SEQ ID NO: 119.

[0750] To construct IL-12/IFN-γ/PD-L2-Fc immunomodulatory molecules, one polypeptide chain comprises from N′ to C′: PD-L2(mut) extracellular domain (e.g., SEQ ID NO: 108 or 110)-GGGGSGGG linker (SEQ ID NO: 244)-single chain IL-12(E59A/F60A) variant (e.g., SEQ ID NO: 68 or 254)-GGGGSGGG linker (SEQ ID NO: 244)-hinge (SEQ ID NO: 88)-Fc domain subunit (SEQ ID NO: 97); and one pairing polypeptide chain comprises from N′ to C′: PD-L2(mut) extracellular domain (e.g., SEQ ID NO: 108 or 110)-GGGSG linker (SEQ ID NO: 209)-single chain IFN-r(A23V/A23V) homodimer variant (SEQ ID NO: 47 or 252)-GGGGSGGG linker (SEQ ID NO: 244)-hinge (SEQ ID NO: 87)-Fc domain subunit (SEQ ID NO: 98).

### IL-12 and IFN-Y Signal Transduction Assay

[0751] HEK-Blue™ IL-12 Cells and HEK-PD-1-IL-12 cells were used to assess IL-12 signal activation activity of the immunomodulatory molecules, as described in Example 1. To assess biological activity of various IFN-γ moieties within the immunomodulatory molecules, HEK-IFN-γ-PD-1 cells were generated in-house by overexpressing human PD-1 in HEK-Blue™ IFN-γ Cells. HEK-IFN-γ reporter assay and HEK-PD-1-IFN-γ reporter assay were conducted similarly as in Example 15.

[0752] As can be seen from Table 20, both IL-12/IFN-γ/PD-L1-Fc and IL-12/IFN-γ/PD-L2-Fc immunomodulatory molecules exhibited IL-12 and IFN-γ activity only in the presence of PD-1 binding. Further, IL-12 and IFN-γ activity did not seem to be strongly impacted by the type of PD-1 binding protein used, as immunomodulatory molecules comprising PD-L1 extracellular domain and PD-L2 extracellular domain performed approximately equally.

[0753] These data indicated that both IL-12 and IFN-γ moieties when positioned at hinge retained PD-1-binding dependent activity when constructed in a trispecific immunomodulatory molecule format. Further, the IL-12 and IFN-γ moieties did not have a significant negative impact on each other's activity (compare HEK-IFN-γ-PD-1 and HEK-IL-12-PD-1 columns).

TABLE 20
IL-12 and IFN-γ biological activity of IL-12/IFN-γ/PD-L1-Fc and IL-12/
IFN-γ/PD-L2-Fc immunomodulatory molecules

| | IL-12 fusion or non- | IFN-γ fusion | | HEK- | | HEK- |
|---|---|---|---|---|---|---|
| | fusion polypeptide | polypeptide | HEK- | IFN-γ- | HEK- | IL-12- |
| Construct | SEQ ID NO: | SEQ ID NO: | IFN-γ | PD-1 | IL-12 | PD-1 |
| IFN-γ | / | / | 100% | 100% | / | / |
| rIL-12 | / | / | / | / | 100% | 100% |
| IFN-γ(A23V/A23V)/ | 132 | 184 | <0.1% | 44% | <0.2% | <0.2% |
| PD-L1(mut2)-Fc | (no IL-12) | (IFN-γ at hinge) | | | | |
| IL-12(E59A/F60A)/IFN- | 155 | 184 | <0.1% | 39% | <0.2% | 32% |
| γ(A23V/A23V)/PD-L1(mut2)-Fc | (IL-12 at hinge) | (IFN-γ at hinge) | | | | |
| IL-12(E59A/F60A)/IFN- | 156 | 185 | <0.1% | 45% | <0.2% | 43% |
| γ(A23V/A23V)/PD-L1(mut7)-Fc | (IL-12 at hinge) | (IFN-γ at hinge) | | | | |
| IL-12(E59A/F60A)/IFN- | 167 | 188 | <0.1% | 35% | <0.2% | 45% |
| γ(A23V/A23V)/PD-L2(mut2)-Fc | (IL-12 at hinge) | (IFN-γ at hinge) | | | | |
| IL-12(E59A/F60A)/IFN- | 168 | 189 | <0.1% | 40% | <0.2% | 49% |
| γ(A23V/A23V)/PD-L2(mut4)-Fc | (IL-12 at hinge) | (IFN-γ at hinge) | | | | |

### Example 28: Generation of IL-2/IL-12/CD155-Fc and IL-12/IFN-γ/CD155-Fc Immunomodulatory Molecules with IL-2, IL-12, and IFN-γ Biological Activity Directed to TIGIT-Positive Cells

[0754] The TIGIT/CD155 pathway plays a similar role as PD-1/PD-L in the inhibition of T cell functions. Like PD-1, TIGIT is highly expressed in intratumoral T cells, such as exhausted T cells. To investigate whether immunomodulatory molecules can be constructed with IL-12, IL-2, and/or IFN-γ activity dependent on binding to TIGIT expressing cells (e.g., T cells), different configurations of immunomodulatory molecules were constructed using CD155 extracellular domain (SEQ ID NO: 137) as the TIGIT binding protein.

[0755] A heterodimeric CD155-Fc was used as the parental CD155-Fc protein, comprising a first polypeptide chain (SEQ ID NO: 138) from N′ to C′: CD155 extracellular domain (SEQ ID NO: 137)-GGGGSGGG linker (SEQ TD NO: 244)-hinge (SEQ ID NO: 88)-Fc domain subunit1 (SEQ ID NO: 97)); and a second polypeptide chain (SEQ ID NO: 139) from N′ to C′: CD155 extracellular domain (SEQ ID NO: 137)-GGGGSGGG linker (SEQ ID NO: 244)-hinge (SEQ ID NO: 87)-Fc domain subunit2 (SEQ ID NO: 98).

### Construction of IL-12/CD155-Fc (IL-12 Hinge) and CD155-Fc/IL-12 (IL-12 C′) Immunomodulatory Molecules

[0756] To generate IL-12/CD155-Fc and CD155-Fc/IL-12 immunomodulatory molecules, one polypeptide chain comprises i) no IL-12 fusion (as control), or ii) IL-12 positioned in the hinge region (SEQ ID NO: 190; from N′ to C′: CD155 extracellular domain (SEQ ID NO: 137)-linker (SEQ ID NO: 244)-single chain IL-12(E59A/F60A) variant (e.g., SEQ ID NO: 68 or 254)-linker (SEQ ID NO: 244)-hinge-(SEQ ID NO: 88)-Fc domain subunit1 (SEQ ID NO: 97)), or iii) IL-12 positioned at the C-terminus of one Fc domain subunit (SEQ ID NO: 191; from N′ to C′: CD155 extracellular domain (SEQ ID NO: 137)-linker (SEQ ID NO: 244)-hinge (SEQ ID NO: 88)-Fc domain subunit1 (SEQ ID NO: 97)-linker (SEQ ID NO: 244)-single chain IL-12(E59A./F60A) variant (e.g., SEQ ID NO: 68 or 254)). The pairing polypeptide chain comprises the sequence of SEQ ID NO: 139.

### Construction of IL-2/CD155-Fc Immunomodulatory Molecules

[0757] To generate IL-2/CD155-Fc immunomodulatory molecules, one polypeptide chain comprises IL-12 or a mutant variant positioned at the hinge region (from N′ to C′: CD155 extracellular domain (SEQ ID NO: 137)-GGGSG linker (SEQ ID NO: 209)-IL-2(mut) (e.g., any of SEQ ID NOs: 26-30)-GGGGSGGG linker (SEQ ID NO: 244)-hinge (SEQ ID NO: 87)-Fc domain subunit2 (SEQ ID NO: 98)). Hence, the polypeptide chain with IL-2 moiety positioned at hinge can comprise the sequence of any of SEQ ID NOs: 247-250. The pairing polypeptide chain without IL-2 fusion comprises the sequence of SEQ ID NO: 138.

### Construction of IFN-γ/CD155-Fc Immunomodulatory Molecules

[0758] To generate IFN-γ/CD155-Fc immunomodulatory molecules, one polypeptide chain comprises i) no IFN-γ (as control; SEQ ID NO: 139), or ii) single-chain homodimer IFN-γ(A23V/A23V) positioned in the hinge region (from N′ to C′: CD155 extracellular domain (SEQ ID NO: 137)-linker (SEQ ID NO: 244)-single chain IFN-γ(A23V/A23V) homodimer variant (SEQ ID NO: 47 or 252)-linker (SEQ ID NO: 244)-hinge (SEQ ID NO: 87)-Fc domain subunit2 (SEQ ID NO: 98)). Hence, the polypeptide chain with IFN-γ moiety positioned at hinge can comprise the sequence of SEQ ID NO: 193. The pairing polypeptide chain without IFN-γ fusion comprises the sequence of SEQ ID NO: 138.

### Construction of IL-12/IL-2/CD155-Fc (IL-12 Hinge) and IL-2/CD155-Fc/IL-12 (IL-12 at C′) Immunomodulatory Molecules

[0759] IL-2/CD155-Fc (IL-2 at hinge) heterodimeric immunomodulatory molecules constructed above can be used as parental construct for making IL-12′IL-2/CD155-Fc (IL-12 at hinge) or IL-2/CD155-Fc/IL-12 (IL-12 at C′ of one of Fc subunits) immunomodulatory molecules. The polypeptide chain with IL-2 moiety positioned at hinge can comprise the sequence of any of SEQ ID NOs: 247-250. The paring polypeptide with single-chain IL-12(E59A/F60A) variant positioned at the hinge region can comprise the sequence of 190; or The paring polypeptide with single-chain IL-12(E59A/F60A) variant positioned at the C′ of the Fc subunit can comprise the sequence of 191 (see above).

### Construction of IL-12/IFN-γ/CD155-Fc (IL-12 Hinge) and IFN-Y/CD155-Fc/IL-12 (IL-12 at C′) Immunomodulatory Molecules

[0760] IFN-γ/CD155-Fc (IFN-γ at hinge) heterodimeric immunomodulatory molecules constructed above can be used as parental construct for making IL-12/IFN-γ/CD155-Fc (IL-12 at hinge) or IFN-γ/CD155-Fc/IL-12 (IL-12 at C′ of one of Fc subunits) immunomodulatory molecules. The polypeptide chain with single-chain IFN-γ(A23V/A23V) homodimer positioned at hinge can comprise the sequence of SEQ ID NO: 193. The paring polypeptide with single-chain IL-12(E59A/F60A) variant positioned at the hinge region can comprise the sequence of 190; or The paring polypeptide with single-chain IL-12(E59A/F60A) variant positioned at the C′ of the Fc subunit can comprise the sequence of 191 (see above).

### IL-12. IL-2, and IFN-γ Signal Transduction Assay

[0761] To assess biological activity of the IL-12 moieties within IL-12 containing immunomodulatory molecules, HEK-Blue™ IL-12-TIGIT cells were generated in-house by overexpressing TIGIT in HEK-Blue™ IL-12 Cells (see Example 1). To assess biological activity of the IL-2 moieties within the IL-2 containing immunomodulatory molecules, HEK-Blue™ IL-2-TIGIT cells were generated in-house by overexpressing TIGIT in HEK-Blue™ IL-2 Cells (see Example 12). To assess biological activity of various IFN-γ moieties within the IFN-γ containing immunomodulatory molecules, HEK-IFN-γ-TIGIT cells were generated in-house by overexpressing human TIGIT in HEK-Blue™ IFN-γ Cells (see Example 15).

[0762] As can be seen from Table 21, bi- and trispecific immunomodulatory molecules comprising IL-12 moiety positioned at binge showed minimal IL-12 activity without CD155/TIGIT binding; in the presence of TIGIT binding, the activity of IL-12 was rescued. Similarly, bi- and trispecific immunomodulatory molecules comprising IL-2 or IFN-γ moiety positioned at hinge region showed minimal IL-2 or IFN-γ activity without CD155/TIGIT binding; in the presence of TIGIT binding, the activity of ˜2 or IFN-γ was rescued. These data indicate that IL-12, IL-2, and IFN-γ when positioned at hinge region all retain TIGIT-binding dependent activity when constructed as bi- or tri-specific immunomodulatory molecules. Further, these data indicate that SE-12, Q-2, and IFN-γ moieties do not have significant negative impact on each other's activity when constructed as bi- or tri-specific immunomodulatory molecules.

TABLE 21
IL-2, IL-12, and IFN-γ biological activity of immunomodulatory molecules
comprising IL-2, IL-12, and/or IFN-γ directed to TIGIT-positive cells

| | IL-12 | IL-2 | IFN-γ | | | | | | |
|---|---|---|---|---|---|---|---|---|---|
| | fusion or | fusion | fusion | | | | | | |
| | non- | poly- | or non- | | | | | | |
| | fusion | peptide | fusion | | | | | | |
| | polypep- | SEQ | polypep- | | HEK- | | HEK- | | HEK- |
| | tide SEQ | ID | tide SEQ | HEK- | IL-2- | HEK- | IFN-γ- | HEK- | IL-12- |
| Construct | ID NO: | NO: | ID NO: | IL-2 | TIGIT | IFN-γ | TIGIT | IL-12 | TIGIT |
| IL-2 | / | / | / | 100% | 100% | / | / | / | / |
| IFN-γ | / | / | / | / | / | 100% | 100% | / | / |
| rIL-12 | / | / | / | / | / | / | / | 100% | 100% |
| IL- | 190 | / | 139 | <0.1% | <0.1% | n/a | n/a | <0.2% | 21% |
| 12(E59A/F60A)/ | (IL-12 | | (no IFN- | | | | | | |
| CD155-Fc | hinge) | | γ) | | | | | | |
| IL-12(E59A/F60A)/IL- | | 247 | / | 12% | 78% | n/a | n/a | <0.2% | 21% |
| 2(L18R/Q22E/R38D/ | | (IL-2 | | | | | | | |
| K43E/E61R)/CD155- | | hinge) | | | | | | | |
| Fc | | | | | | | | | |
| IL-12(E59A/F60A)/IL- | | 248 | / | 4% | 35% | n/a | n/a | <0.2% | 17% |
| 2(R38D/K43E/E61R/ | | (IL-2 | | | | | | | |
| Q126T)/CD155-Fc | | hinge) | | | | | | | |
| IL-12(E59A/F60A)/IL- | | 249 | / | 2% | 20% | n/a | n/a | <0.2% | 19% |
| 2(L18R/Q22E/R38D/ | | (IL-2 | | | | | | | |
| K43E/E61R/Q126T)/ | | hinge) | | | | | | | |
| CD155-Fc | | | | | | | | | |
| IL-12(E59A/F60A)/IL- | | 250 | / | <0.1% | <0.1% | n/a | n/a | <0.2% | 15% |
| 2(L18R/Q22E/R38D/ | | (IL-2 | | | | | | | |
| K43E/E6IRQ126T/ | | hinge) | | | | | | | |
| S130R)/CD155-Fc | | | | | | | | | |
| IL- | | / | 193 | n/a | n/a | <0.2% | 49 | <0.2% | 40% |
| 12(E59A/F60A)/IFN- | | | (IFN-γ | | | | | | |
| γ(A23V/A23V)/ | | | hinge) | | | | | | |
| CD155-Fc | | | | | | | | | |
| IL-12(E59A/F60A)/ | 191 | / | 139 | <0.1% | <0.1% | n/a | n/a | 2% | 35% |
| CD155-Fc | (IL-12 at | | (no IFN- | | | | | | |
| | C′) | | γ) | | | | | | |
| IL-2(L18R/Q22E/ | | 247 | / | 15% | 81% | n/a | n/a | 1% | 42% |
| R38D/K43E/E61R)/ | | (IL-2 | | | | | | | |
| CD155-Fc/IL- | | hinge) | | | | | | | |
| 12(E59A/F60A) | | | | | | | | | |
| IL-2(R38D/K43E/ | | 248 | / | 3% | 28% | n/a | n/a | 2% | 32% |
| E61R/Q126T)/CD155- | | (IL-2 | | | | | | | |
| Fc/IL-12(E59A/F60A) | | hinge) | | | | | | | |
| IL-2(L18R/Q22E/ | | 249 | / | 5% | 18% | n/a | n/a | <0.2% | 29% |
| R38D/K43E/E61R/ | | (IL-2 | | | | | | | |
| Q126T)/CD155- | | hinge) | | | | | | | |
| Fc/IL-12(E59A/F60A) | | | | | | | | | |
| IL-2(L18R/Q22E/ | | 250 | / | <0.1% | <0.1% | n/a | n/a | 3% | 24% |
| R38D/K43E/E61R/ | | (IL-2 | | | | | | | |
| Q126T/S130R)/ | | hinge) | | | | | | | |
| CD155-Fc/IL- | | | | | | | | | |
| 12(E59A/F60A) | | | | | | | | | |
| IFN-γ(A23V/ | | / | 193 | n/a | n/a | <0.2% | 45% | 2% | 60% |
| A23V)/CD155-Fc/ | | | (IFN-γ | | | | | | |
| IL-12(E59A/F60A) | | | hinge) | | | | | | |
| CD155-Fc | 138 | / | 139 | <0.1% | <0.1% | n/a | n/a | n/a | n/a |
| (control) | (no IL-12) | | (no IFN- | | | | | | |
| | | | γ | | | | | | |
| IL-2(L18R/Q22E/ | | 247 | / | 9% | 56% | n/a | n/a | n/a | n/a |
| R38D/K43E/E61R)/ | | (IL-2 | | | | | | | |
| CD155-Fc | | hinge) | | | | | | | |
| IL-2(R38D/K43E/ | | 248 | / | 3% | 29% | n/a | n/a | n/a | n/a |
| E61R/Q126T)/ | | (IL-2 | | | | | | | |
| CD155-Fc | | hinge) | | | | | | | |
| IL-2(L18R/Q22E/ | | 249 | / | 2% | 15% | n/a | n/a | n/a | n/a |
| R38D/K43E/E61R/ | | (IL-2 | | | | | | | |
| Q126T)/CD155-Fc | | hinge) | | | | | | | |
| IL- | | 250 | / | <0.1% | <0.1% | n/a | n/a | n/a | n/a |
| 2(L18R/Q22E/R38D/ | | (IL-2 | | | | | | | |
| K43E/E61R/Q126T/ | | hinge) | | | | | | | |
| S130R)/CD 155-Fc | | | | | | | | | |
| IN-γ(A23V/A23V)/ | | / | 193 | n/a | n/a | <0.2% | 35% | n/a | n/a |
| CD155-Fc | | | (IFN-γ | | | | | | |
| | | | hinge) | | | | | | |

SEQUENCE LISTING
SEQ ID NO: 1 (wildtype human CTLA-4 extracellular domain-hinge-IgG1 Fc mutant2; CTLA-4
extracellular domain is underlined; hinge is bolded; linker is bolded and underlined)
KAMHVAQPAVVLASSRGIASFVCEYASPGKATEVRVTVLRQADSQVTEVCAATYMMGNELTFLDDSICTG
TSSGNQVNLTIQGLRAMDTGLYICKVELMYPPPYYLGIGNGTQIYVIDPEPCPDSDGSGDKTHTCPPCPAP

[chemical structure]

[chemical structure]

[chemical structure]

LSLSPGK
SEQ ID NO: 2 (wildtype human CTLA-4 extracellular domain-linker-hinge-IgG1 Fc mutant1-linker-single-
chain IL-12 mutant heterodimer IL-12B (p40 E59A/F60A)-linker-IL-12A (wt p35); CTLA-4 extracellular
domain is underlined; linker is bolded and underlined; hinge is bolded; IL-12 subunits are italicized)
KAMHVAQPAVVLASSRGIASFVCEYASPGKATEVRVTVLRQADSQVTEVCAATYMMGNELTFLDDSICTG
TSSGNQVNLTIQGLRAMDTGLYICKVELMYPPPYYLGIGNGTQIYVIDPEPCPDSDGSGDKTHTCPPCPAP

[chemical structure]

[chemical structure]

[chemical structure]

SLSPGKGGGGGGGGSGGGGSIWELKKDVYVVELDWYPDAPGEMVVLTCDTPEEDGITWTLDOSSEVLGSGK

[chemical structure]

STDLTFSVKSSRGSSDPQGVTCGAATLSAERVRGDNKEYEYSVECQEDSACPAAEESLPIEVMVDAVHKLKYENYT
SSFFIRDIIKPDPPKNLQLKPLKNSRQVEVSWEYPDTWSTPHSYFSLTFCVQVQGKSKREKKDRVFTDKTSATVICR
KNASISVRAQDRYYSSSWSEWASVPCSGGGGSGGGGSGGGGSGGGGSGRNLPVATPDPGMFPCLHHSQNLLR
AVSNMLQKARQTLEFYPCTSEEIDHEDITKDKTSTVEACLPLELTKNESCLNSRETSFITNGSCLASRKTSFMMALC
LSSIYEDLKMYQVEFKTMNAKLLMDPKRQIFLDQNMLAVIDELMQALNENSETVPQKSSLEEPDFYKTKIKLCILL
HAFRIRAVTIDRVMSYLNAS
SEQ ID NO: 3 (wildtype human CTLA-4 extracellular domain-linker-hinge-IgG1 Fc mutant1-linker-single-
chain IL-12 mutant heterodimer IL-12B (p40 F60A)-linker-IL-12A (wt p35) ; CTLA-4 extracellular domain
is underlined; linker is bolded and underlined; hinge is bolded; IL-12 subunits are italicized)
KAMHVAQPAVVLASSRGIASFVCEYASPGKATEVRVTVLROADSQVTEVCAATYMMGNELTFLDDSICTG
TSSGNQVNLTIQGLRAMDTGLYICKVELMYPPPYYLGIGNGTQIYVIDPEPCPDSDGSGDKTHTCPPCPAP

[chemical structure]

[chemical structure]

[chemical structure]

SLSPGKGGGGGGGGGGGGSIWELKKDVYVVELDWYPDAPGEMVVLTCDTPEEDGITWTLDQSSEVLGSGK

[chemical structure]

STDLTFSVKSSRGSSDPQGVTCGAATLSAERVRGDNKEYEYSVECQEDSACPAAEESLPIEVMVDAVHKLKYENYT
SSFFIRDIIKPDPPKNLQLKPLKNSROVEVSWEYPDTWSTPHSYFSLTFCVQVQGKSKREKKDRVFTDKTSATVICR
KNASISVRAQDRYYSSSWSEWASVPCSGGGGSGGGGSGGGGSGGGGSGRNLPVATPDPGMFPCLHHSQNLLR
AVSNMLQKARQTLEFYPCTSEEIDHEDITKDKTSTVEACLPLELTKNESCLNSRETSFIINGSCLASRKTSFMMALC
LSSIYEDLKMYOVEFKTMNAKLLMDPKRQIFLDQNMLAVIDELMQALNENSETVPQKSSLEEPDFYKTKIKLCILL
HAFRIRAVTIDRVMSYLNAS
SEQ ID NO: 4 (wildtype human CTLA-4 extracellular domain-linker-single-chain IL-12 mutant heterodimer
IL-12B (p40 E59A/F60A)-linker-IL-12A (wt p35)-hinge-IgG1 Fc mutant1; CTLA-4 extracellular domain is
underlined; linker is bolded and underlined; hinge is bolded; IL-12 subunits are italicized)
KAMHVAQPAVVLASSRGIASFVCEYASPGKATEVRVTVLRQADSQVTEVCAATYMMGNELTFLDDSICTG
TSSGNQVNLTIQGLRAMDTGLYICKVELMYPPPYYLGIGNGTQIYVIDPEPCPDSDGSGIWELKKDVYVVELD

[chemical structure]

IWSTDILKDOKEPKNKTFLRCEAKNYSGRFTCWWLTTISTDLTFSVKSSRGSSDPQGVTCGAATLSAERVRGDNKE
YEYSVECQEDSACPAAEESLPIEVMVDAVHKLKYENYTSSFFIRDIIKPDPPKNLQLKPLKNSROVEVSWEYPDTWS
TPHSYFSLTFCVQVQGKSKREKKDRVFTDKTSATVICRKNASISVRAODRYYSSSWSEWASVPCSGGGGSGGGGS
GGGGSGGGGSGRNLPVATPDPGMFPCLHHSQNLLRAVSNMLQKARQTLEFYPCTSEEIDHEDITKDKTSTVEA
CLPLELTKNESCLNSRETSFITNGSCLASRKTSFMMALCLSSIYEDLKMYQVEFKTMNAKLLMDPKRQIFLDQNML

[chemical structure]

GPSVFLFPPKPKDTLMISRTPEVTCVVVDVSHEDPEVKFNWYVDGVEVHNAKTKPREEQYNSTYRVVSVL

[chemical structure]

[chemical structure]

K
SEQ ID NO: 5 (wildtype human CTLA-4 extracellular domain-linker-single-chain IL-12 mutant heterodimer
IL-12B (p40 F60A)-linker-IL-12A (wt p35)-hinge-IgG1 Fe mutant1; CTLA-4 extracellular domain is
underlined; linker is bolded and underlined; hinge is bolded; IL-12 subunits are italicized)
KAMHVAQPAVVLASSRGIASFVCEYASPGKATEVRVTVLRQADSQVTEVCAATYMMGNELTELDDSICTG
TSSGNOVNLTIQGLRAMDTGLYICKVELMYPPPYYLGIGNGTQIYVIDPEPCPDSDGSGIWELKKDVYVVELD

[chemical structure]

IWSTDILKDOKEPKNKTFLRCEAKNYSGRFTCWWLTTISTDLTFSVKSSRGSSDPQGVTCGAATLSAERVRGDNKE
YEYSVECOEDSACPAAEESLPIEVMVDAVHKLKYENYTSSFFIRDIIKPDPPKNLQLKPLKNSROVEVSWEYPDTWS
TPHSYFSLTFCVQVQGKSKREKKDRVFTDKTSATVICRKNASISVRAQDRYYSSSWSEWASVPCSGGGGSGGGGS
GGGGSGGGGSGRNLPVATPDPGMFPCLHHSONLLRAVSNMLQKARQTLEFYPCTSEEIDHEDITKDKTSTVEA
CLPLELTKNESCLNSRETSFITNGSCLASRKTSFMMALCLSSIYEDLKMYQVEFKTMNAKLLMDPKRQIFLDQNML

[chemical structure]

GPSVFLFPPKPKDTLMISRTPEVTCVVVDVSHEDPEVKFNWYVDGVEVHNAKTKPREEQYNSTYRVVSVL

[chemical structure]

[chemical structure]

K
SEQ ID NO: 6 (wildtype human PD-L1 WT extracellular domain-hinge-IgG1 Fc mutant2; PD-L1
extracellular domain is underlined; hinge is bolded; linker is bolded and underlined)
FTVTVPKDLYVVEYGSNMTIECKFPVEKQLDLAALIVYWEMEDKNIIQFVHGEEDLKVOHSSYRORARLL
KDQLSLGNAALQITDVKLQDAGVYRCMISYGGADYKRITVKVNAPYNKINQRILVVDPVTSEHELTCQAE
GYPKAEVIWTSSDHQVLSGKTTTTNSKREEKLFNVTSTLRINTTTNEIFYCTERRLDPEENHTAELVIPELPL

[chemical structure]

DGVEVHNAKTKPREEQYNSTYRVVSVLTVLHQDWLNGKEYKCKVSNKALPAPIEKTISKAKGQPREPQVY

[chemical structure]

QGNVFSCSVMHEALHNHYTQKSLSLSPGK
SEQ ID NO: 7 (wildtype human PD-L1 WT extracellular domain-linker-hinge-IgG1 Fc mutant1-linker-
single-chain IL-12 mutant heterodimer IL-12B (p40 E59A/F60A)-linker-IL-12A (wt p35); PD-L1
extracellular domain is underlined; hinge is bolded; linker is bolded and underlined)
FTVTVPKDLYVVEYGSNMTIECKFPVEKQLDLAALIVYWEMEDKNIIQFVHGEEDLKVQHSSYRORARLL
KDQLSLGNAALQITDVKLQDAGVYRCMISYGGADYKRITVKVNAPYNKINQRILVVDPVTSEHELTCQAE
GYPKAEVIWTSSDHQVLSGKTTTTNSKREEKLFNVTSTLRINTTTNEIFYCTFRRLDPEENHTAELVIPELPL

[chemical structure]

GVEVHNAKTKPREEQYNSTYRVVSVLTVLHQDWLNGKEYKCKVSNKALPAPIEKTISKAKGQPREPQVY

[chemical structure]

GNVFSCSVMHEALHNHYTQKSLSLSPGKGGGGSGGGGSGGGGSIWELKKDVYVVELDWYPDAPGEMVVLT

[chemical structure]

NKTFLRCEAKNYSGRFTCWWLTTISTDLTFSVKSSRGSSDPQGVTCGAATLSAERVRGDNKEYEYSVECQEDSACP
AAEESLPIEVMVDAVHKLKYENYTSSFFIRDIIKPDPPKNLQLKPLKNSRQVEVSWEYPDTWSTPHSYFSLTFCVQV
QGKSKREKKDRVFTDKTSATVICRKNASISVRAQDRYYSSSWSEWASVPCSGGGGSGGGGSGGGGSGGGGSG
RNLPVATPDPGMFPCLHHSONLLRAVSNMLQKARQTLEFYPCTSEEIDHEDITKDKTSTVEACLPLELTKNESCLN
SRETSFITNGSCLASRKTSFMMALCLSSIYEDLKMYQVEFKIMNAKLLMDPKRQIFLDQNMLAVIDELMOALNENS
ETVPQKSSLEEPDFYKTKIKLCILLHAFRIRAVTIDRVMSYLNAS
SEQ ID NO: 8 (wildtype human PD-L1 WT extracellular domain-linker-hinge-IgG1 Fc mutant1-linker-
single-chain IL-12 mutant heterodimer IL-12B (p40 F60A)-linker-IL-12A (wt p35); PD-L1 extracellular
domain is underlined; hinge is bolded; linker is bolded and underlined)
FTVTVPKDLYVVEYGSNMTIECKFPVEKQLDLAALIVYWEMEDKNIIQFVHGEEDLKVQHSSYRQRARLL
KDQLSLGNAALQITDVKLQDAGVYRCMISYGGADYKRITVKVNAPYNKINQRILVVDPVTSEHELTCQAE
GYPKAEVIWTSSDHQVLSGKTTTTNSKREEKLFNVTSTLRINTTTNEIFYCTFRRLDPEENHTAELVIPELPL

[chemical structure]

GVEVHNAKTKPREEQYNSTYRVVSVLTVLHQDWLNGKEYKCKVSNKALPAPIEKTISKAKGQPREPQVY

[chemical structure]

GNVFSCSVMHEALHNHYTOKSLSLSPGKGGGGSGGGGSGGGGSIWELKKDVYVVELDWYPDAPGEMVVLT

[chemical structure]

NKTFLRCEAKNYSGRFTCWWLTTISTDLTFSVKSSRGSSDPQGVTCGAATLSAERVRGDNKEYEYSVECOEDSACP
AAEESLPIEVMVDAVHKLKYENYTSSFFIRDIKPDPPKNLQLKPLKNSRQVEVSWEYPDTWSTPHSYFSLTFCVQV
QGKSKREKKDRVFTDKTSATVICRKNASISVRAQDRYYSSSWSEWASVPCSGGGGSGGGGSGGGGSGGGGSG
RNLPVATPDPGMFPCLHHSQNLLRAVSNMLQKARQTLEFYPCTSEEIDHEDITKDKTSTVEACLPLELTKNESCLN
SRETSFITNGSCLASRKTSFMMALCLSSIYEDLKMYQVEFKTMNAKLLMDPKRQIFLDQNMLAVIDELMQALNENS
ETVPQKSSLEEPDFYKTKIKLCILLHAFRIRAVTIDRVMSYLNAS
SEQ ID NO: 9 (wildtype human PD-L1 WT extracellular domain-linker-single-chain IL-12 mutant
heterodimer IL~12B (p40 E59A/F60A)-linker-IL-12A (wt p35)-hinge-IgG1 Fc mutant1; PD-L1 extracellular
domain is underlined; linker is bolded and underlined; hinge is bolded; IL-12 subunits are italicized)
FTVTVPKDLYVVEYGSNMTIECKFPVEKQLDLAALIVYWEMEDKNIIQFVHGEEDLKVQHSSYRORARLL
KDQLSLGNAALQITDVKLQDAGVYRCMISYGGADYKRITVKVNAPYNKINQRILVVDPVTSEHELTCQAE
GYPKAEVIWTSSDHQVLSGKTTTTNSKREEKLFNVTSTLRINTTTNEIFYCTFRRLDPEENHTAELVIPELPL

[chemical structure]

QYTCHKGGEVLSHSLLLLHKKEDGIWSTDILKDQKEPKNKTFLRCEAKNYSGRFTCWWLTTISTDLTESVKSSRGS
SDPQGVTCGAATLSAERVRGDNKEYEYSVECQEDSACPAAEESLPIEVMVDAVHKLKYENYTSSFFIRDIIKPDPPK
NLQLKPLKNSRQVEVSWEYPDTWSTPHSYFSLTFCVQVQGKSKREKKDRVFTDKTSATVICRKNASISVRAQDRYY
SSSWSEWASVPCSGGGGSGGGGSGGGGSGGGGSGRNLPVATPDPGMFPCLHHSQNLLRAVSNMLQKARQTL
EFYPCTSEEIDHEDITKDKTSTVEACLPLELTKNESCLNSRETSFITNGSCLASRKTSFMMALCLSSIYEDLKMYOVE
FKTMNAKLLMDPKROIFLDQNMLAVIDELMQALNENSETVPQKSSLEEPDFYKTKIKLCILLHAFRIRAVTIDRVM

[chemical structure]

[chemical structure]

[chemical structure]

SCSVMHEALHNHYTQKSLSLSPGK
SEQ ID NO: 10 (wildtype human PD-L1 WT extracellular domain-linker-single-chain IL-12 mutant
heterodimer IL-12B (p40 F60A)-linker-IL-12A (wt p35)-hinge-IgG1 Fc mutant1; PD-L1 extracellular domain
is underlined; linker is bolded and underlined; hinge is bolded; IL-12 subunits are italicized)
FTVTVPKDLYVVEYGSNMTIECKFPVEKQLDLAALIVYWEMEDKNIIQFVHGEEDLKVOHSSYRORARLL
KDQLSLGNAALQITDVKLQDAGVYRCMISYGGADYKRITVKVNAPYNKINQRILVVDPVTSEHELTCQAE
GYPKAEVIWTSSDHQVLSGKTTTTNSKREEKLENVISTLRINTTTNEIFYCTFRRLDPEENHTAELVIPELPL

[chemical structure]

QYTCHKGGEVLSHSLLLLHKKEDGIWSTDILKDQKEPKNKTFLRCEAKNYSGRFTCWWLTTISTDLTFSVKSSRGS
SDPQGVTCGAATLSAERVRGDNKEYEYSVECQEDSACPAAEESLPIEVMVDAVHKLKYENYTSSFFIRDIIKPDPPK
NLQLKPLKNSRQVEVSWEYPDTWSTPHSYFSLTFCVQVQGKSKREKKDRVFTDKTSATVICRKNASISVRAODRYY
SSSWSEWASVPCSGGGGSGGGGSGGGGSGGGGSGRNLPVATPDPGMFPCLHHSQNLLRAVSNMLOKARQTL
EFYPCTSEEIDHEDITKDKTSTVEACLPLELTKNESCLNSRETSFITNGSCLASRKTSFMMALCLSSIYEDLKMYOVE
FKTMNAKLLMDPKRQIFLDQNMLAVIDELMQALNENSETVPQKSSLEEPDFYKTKIKLCILLHAFRIRAVTIDRVM

[chemical structure]

[chemical structure]

[chemical structure]

SCSVMHEALHNHYTQKSLSLSPGK.
SEQ ID NO: 11 (human PD-L1 mutant extracellular domain-hinge-IgG1 Fc mutant2; PD-L1 extracellular
domain is underlined; hinge is bolded; linker is bolded and underlined)

[chemical structure]

[chemical structure]

EGYPKAEVIWTSSDHQVLSGKTTTTNSKREEKLENVTSTLRINTTTNEIFYCTERRLDPEENHTAELVIPELPL

[chemical structure]

DGVEVHNAKTKPREEQYNSTYRVVSVLTVLHQDWLNGKEYKCKVSNKALPAPIEKTISKAKGQPREPQVY

[chemical structure]

QGNVFSCSVMHEALHNHYTQKSLSLSPGK
SEQ ID NO: 12 (human PD-L1 mutant extracellular domain-linker-binge-IgG1 Fc mutant1-linker-single-
chain IL-12 mutant heterodimer IL-12B (p40 E59A/F60A)-linker-IL-12A (wt p35); PD-L1 extracellular
domain is underlined; linker is bolded and underlined; hinge is bolded; IL-12 subunits are italicized)

[chemical structure]

[chemical structure]

EGYPKAEVIWTSSDHQVLSGKTTTTNSKREEKLFNVTSTLRINTTTNEIFYCTFRRLDPEENHTAELVIPELPL

[chemical structure]

GVEVHNAKTKPREEQYNSTYRVVSVLTVLHQDWLNGKEYKCKVSNKALPAPIEKTISKAK GQPREPQVY

[chemical structure]

GNVFSCSVMHEALHNHYTQKSLSLSPGKGGGGSGGGGSGGGGSIWELKKDVYVVELDWYPDAPGEMVVLT

[chemical structure]

NKTFLRCEAKNYSGRFTCWWLTTISTDLTFSVKSSRGSSDPQGVTCGAATLSAERVRGDNKEYEYSVECQEDSACP
AAEESLPIEVMVDAVHKLKYENYTSSFFIRDIIKPDPPKNLQLKPLKNSROVEVSWEYPDTWSTPHSYFSLTFCVQV
QGKSKREKKDRVFTDKTSATVICRKNASISVRAQDRYYSSSWSEWASVPCSGGGGSGGGGSGGGGSGGGGSG
RNLPVATPDPGMFPCLHHSQNLLRAVSNMLQKARQTLEFYPCTSEEIDHEDITKDKTSTVEACLPLELTKNESCLN
SRETSFITNGSCLASRKTSFMMALCLSSIYEDLKMYQVEFKTMNAKLLMDPKRQIFLDQNMLAVIDELMQALNENS
ETVPQKSSLEEPDFYKTKIKLCILLHAFRIRAVTIDRVMSYLNAS
SEQ ID NO: 13 (human PD-L1 mutant extracellular domain-linker-hinge-IgG1 Fc mutant1-linker-single-
chain IL-12 mutant heterodimer IL-12B (p40 F60A)-linker-IL-12A (wt p35); PD-L1 extracellular domain is
underlined; linker is bolded and underlined; hinge is bolded; IL-12 subunits are italicized)

[chemical structure]

[chemical structure]

EGYPKAEVIWTSSDHQVLSGKTTTTNSKREEKLENVTSTLRINTTTNEIFYCTFRRLDPEENHTAELVIPELPL

[chemical structure]

GVEVHNAKTKPREEQYNSTYRVVSVLTVLHQDWLNGKEYKCKVSNKALPAPIEKTISKAKGQPREPQVY

[chemical structure]

GNVFSCSVMHEALHNHYTQKSLSLSPGKGGGGSGGGGGGGGSIWELKKDVYVVELDWYPDAPGEMVVLT

[chemical structure]

NKTFLRCEAKNYSGRFTCWWLTTISTDLTFSVKSSRGSSDPQGVTCGAATLSAERVRGDNKEYEYSVECOEDSACP
AAEESLPIEVMVDAVHKLKYENYTSSFFIRDIIKPDPPKNLQLKPLKNSRQVEVSWEYPDTWSTPHSYFSLTFCVQV
QGKSKREKKDRVFTDKTSATVICRKNASISVRAQDRYYSSSWSEWASVPCSGGGGSGGGGSGGGGSGGGGSG
RNLPVATPDPGMFPCLHHSQNLLRAVSNMLQKARQTLEFYPCTSEEIDHEDITKDKTSTVEACLPLELTKNESCLN
SRETSFITNGSCLASRKTSFMMALCLSSIYEDLKMYQVEFKTMNAKLLMDPKRQIFLDQNMLAVIDELMOALNENS
ETVPQKSSLEEPDFYKTKIKLCILLHAFRIRAVTIDRVMSYLNAS
SEQ ID NO: 14 (human PD-L1 mutant extracellular domain-linker-single-chain IL-12 mutant heterodimer
IL-12B (p40 E59A/F60A)-linker-IL-12A (wt p35)-hinge-IgG1 Fc mutant1; PD-L1 extracellular domain is
underlined; linker is bolded and underlined; hinge is bolded; IL-12 subunits are italicized)

[chemical structure]

[chemical structure]

EGYPKAEVIWTSSDHQVLSGKTTTTNSKREEKLFNVTSTLRINTTTNEIFYCTFRRLDPEENHTAELVIPELPL

[chemical structure]

QYTCHKGGEVLSHSLLLLHKKEDGIWSTDILKDQKEPKNKTFLRCEAKNYSGRFTCWWLTTISTDLTFSVKSSRGS
SDPQGVTCGAATLSAERVRGDNKEYEYSVECQEDSACPAAEESLPIEVMVDAVHKLKYENYTSSFFIRDIIKPDPPK
NLQLKPLKNSRQVEVSWEYPDTWSTPHSYFSLTFCVQVQGKSKREKKDRVFTDKTSATVICRKNASISVRAQDRYY
SSSWSEWASVPCSGGGGSGGGGSGGGGSGGGGSGRNLPVATPDPGMFPCLHHSQNLLRAVSNMLQKARQTL
EFYPCTSEEIDHEDITKDKTSTVEACLPLELTKNESCLNSRETSFITNGSCLASRKTSFMMALCLSSIYEDLKMYQVE
FKTMNAKLLMDPKROIFLDQNMLAVIDELMQALNENSETVPQKSSLEEPDFYKTKIKLCILLHAFRIRAVTIDRVM

[chemical structure]

[chemical structure]

[chemical structure]

SCSVMHEALHNHYTQKSLSLSPGK
SEQ ID NO: 15 (human PD-L1 mutant extracellular domain-linker-single-chain IL-12 mutant heterodimer
IL-12B (p40 F60A)-linker-IL~12A (wt p35)-hinge-IgG1 Fc mutant1; PD-L1 extracellular domain is
underlined; linker is bolded and underlined; hinge is bolded; IL-12 subunits are italicized)

[chemical structure]

[chemical structure]

EGYPKAEVIWTSSDHQVLSGKTTTTNSKREEKLFNVTSTLRINTTTNEIFYCTFRRLDPEENHTAELVIPELPL

[chemical structure]

QYTCHKGGEVLSHSLLLLHKKEDGIWSTDILKDQKEPKNKTFLRCEAKNYSGRFTCWWLTTISTDLTFSVKSSRGS
SDPQGVTCGAATLSAERVRGDNKEYEYSVECQEDSACPAAEESLPIEVMVDAVHKLKYENYTSSFFIRDIIKPDPPK
NLQLKPLKNSRQVEVSWEYPDTWSTPHSYFSLTFCVQVQGKSKREKKDRVFTDKTSATVICRKNASISVRAQDRYY
SSSWSEWASVPCSGGGGSGGGGSGGGGSGGGGSGRNLPVATPDPGMFPCLHHSQNLLRAVSNMLQKARQTL
EFYPCTSEEIDHEDITKDKTSTVEACLPLELTKNESCLNSRETSFITNGSCLASRKTSEMMALCLSSIYEDLKMYQVE
FKTMNAKLLMDPKRQIFLDQNMLAVIDELMQALNENSETVPQKSSLEEPDFYKTKIKLCILLHAFRIRAVTIDRVM

[chemical structure]

[chemical structure]

[chemical structure]

SCSVMHEALHNHYTQKSLSLSPGK
SEQ ID NO: 16 (wildtype human PD-L2 extracellular domain-hinge-IgG1 Fc mutant2; PD-L2 extracellular
domain is underlined; hinge is bolded; linker is bolded and underlined)
LFTVTVPKELYIIEHGSNVTLECNFDTGSHVNLGAITASLQKVENDTSPHRERATLLEEQLPLGKASFHIPQV
QVRDEGQYQCIIIYGVAWDYKYLTLKVKASYRKINTHILKVPETDEVELTCQATGYPLAEVSWPNVSVPAN
TSHSRIPEGLYQVTSVLRLKPPPGRNFSCVFWNTHVRELTLASIDLQSQMEPRTHPTGSGDKTHTCPPCPA

[chemical structure]

[chemical structure]

[chemical structure]

LSLSPGK
SEQ ID NO: 17 (wildtype human PD-L2 extracellular domain-linker-single-chain IL-12 mutant heterodimer
IL-12B (p40 E59A/F60A)-linker-IL~12A (wt p35)-hinge-IgG1 Fc mutant1; PD-L2 extracellular domain is
underlined; linker is bolded and underlined; hinge is bolded; IL-12 subunits are italicized)
LFTVTVPKELYIIEHGSNVTLECNEDTGSHVNLGAITASLQKVENDTSPHRERATLLEEQLPLGKASFHIPQV
QVRDEGQYQCIIIYGVAWDYKYLTLKVKASYRKINTHILKVPETDEVELTCQATGYPLAEVSWPNVSVPAN
TSHSRTPEGLYQVTSVLRLKPPPGRNFSCVFWNTHVRELTLASIDLQSQMEPRTHPTGSGIWELKKDVYVVEL

[chemical structure]

GIWSTDILKDOKEPKNKTFLRCEAKNYSGRFTCWWLTTISTDLTFSVKSSRGSSDPQGVTCGAATLSAERVRGDNK
EYEYSVECOEDSACPAAEESLPIEVMVDAVHKLKYENYTSSFFIRDIIKPDPPKNLQLKPLKNSRQVEVSWEYPDTW
STPHSYFSLIFCVQVQGKSKREKKDRVFTDKTSATVICRKNASISVRAQDRYYSSSWSEWASVPCSGGGGSGGGG
SGGGGSGGGGSGRNLPVATPDPGMFPCLHHSQNLLRAVSNMLQKARQTLEFYPCTSEEIDHEDITKDKTSTVE
ACLPLELTKNESCLNSRETSFITNGSCLASRKTSFMMALCLSSIYEDLKMYQVEFKTMNAKLLMDPKRQIFLDQNM

[chemical structure]

GPSVFLFPPKPKDTLMISRTPEVTCVVVDVSHEDPEVKFNWYVDGVEVHNAKTKPREEQYNSTYRVVSVL

[chemical structure]

[chemical structure]

K
SEQ ID NO: 18 (wildtype human PD-L2 extracellular domain-linker-single-chain IL-12 mutant heterodimer
IL-12B (p40 F60A)-linker-IL-12A (wt p35)-hinge-IgG1 Fc mutant1; PD-L2 extracellular domain is
underlined; linker is bolded and underlined; hinge is bolded; IL-12 subanits are italicized)
LFTVTVPKELYIIEHGSNVTLECNFDTGSHVNLGAITASLQKVENDTSPHRERATLLEEQLPLGKASFHIPOV
QVRDEGQYQCIIIYGVAWDYKYLTLKVKASYRKINTHILKVPETDEVELTCQATGYPLAEVSWPNVSVPAN
TSHSRTPEGLYQVTSVLRLKPPPGRNFSCVFWNTHVRELTLASIDLQSQMEPRTHPTGSGIWELKKDVYVVEL

[chemical structure]

GIWSTDILKDOKEPKNKTFLRCEAKNYSGRFTCWWLTTISTDLTFSVKSSRGSSDPQGVTCGAATLSAERVRGDNK
EYEYSVECQEDSACPAAEESLPIEVMVDAVHKLKYENYTSSFFIRDIIKPDPPKNLQLKPLKNSRQVEVSWEYPDTW
STPHSYFSLTFCVQVQGKSKREKKDRVFTDKTSATVICRKNASISVRAQDRYYSSSWSEWASVPCSGGGGGGGG
SGGGGSGGGGSGRNLPVATPDPGMFPCLHHSONLLRAVSNMLQKARQTLEFYPCTSEEIDHEDITKDKTSTVE
ACLPLELTKNESCLNSRETSFITNGSCLASRKTSEMMALCLSSIYEDLKMYQVEFKTMNAKLLMDPKRQIFLDQNM

[chemical structure]

GPSVFLFPPKPKDTLMISRTPEVTCVVVDVSHEDPEVKFNWYVDGVEVHNAKTKPREEQYNSTYRVVSVL

[chemical structure]

[chemical structure]

K
SEQ ID NO: 19 (wildtype human PD-L2 extracellular domain-linker-hinge-IgG1 Fc mutant1-linker-single-
chain IL-12 mutant heterodimer IL-12B (p40 E59A/F60A)-linker-IL-12A (wt p35); PD-L2 extracellular
domain is underlined; linker is bolded and underlined; hinge is bolded; IL-12 subunits are italicized)
LFTVTVPKELYIIEHGSNVTLECNFDTGSHVNLGAITASLQKVENDTSPHRERATLLEEQLPLGKASFHIPQV
QVRDEGQYQCIIIYGVAWDYKYLILKVKASYRKINTHILKVPETDEVELTCQATGYPLAEVSWPNVSVPAN
TSHSRTPEGLYQVTSVLRLKPPPGRNFSCVFWNTHVRELTLASIDLQSQMEPRTHPTGSGDKTHTCPPCPA

[chemical structure]

[chemical structure]

[chemical structure]

LSLSPGKGGGGSGGGGGGGGSIWELKKDVYVVELDWYPDAPGEMVVLTCDTPEEDGITWTLDQSSEVLGSG

[chemical structure]

TISTDLTFSVKSSRGSSDPQGVTCGAATLSAERVRGDNKEYEYSVECQEDSACPAAEESLPIEVMVDAVHKLKYENY
TSSFFIRDIKPDPPKNLQLKPLKNSROVEVSWEYPDTWSTPHSYFSLTFCVQVQGKSKREKKDRVFTDKTSATVIC
RKNASISVRAQDRYYSSSWSEWASVPCSGGGGSGGGGSGGGGSGGGGSGRNLPVATPDPGMFPCLHHSQNLL
RAVSNMLOKARQTLEFYPCTSEEIDHEDITKDKTSTVEACLPLELTKNESCLNSRETSFITNGSCLASRKTSEMMAL
CLSSIYEDLKMYQVEFKTMNAKLLMDPKRQIFLDQNMLAVIDELMQALNENSETVPQKSSLEEPDFYKTKIKLCIL
LHAFRIRAVTIDRVMSYLNAS
SEQ ID NO: 20 (wildtype human PD-L2 extracellular domain-linker-hinge-IgG1 Fc mutant1-linker-single-
chain IL-12 mutant heterodimer IL-12B (p40 F60A)-linker-IL-12A (wt p35); PD-L2 extracellular domain is
underlined; linker is bolded and underlined; hinge is bolded; IL-12 subunits are italicized)
LFTVTVPKELYIIEHGSNVTLECNEDTGSHVNLGAITASLQKVENDTSPHRERATLLEEQLPLGKASFHIPQV
QVRDEGOYQCIIIYGVAWDYKYLTLKVKASYRKINTHILKVPETDEVELTCQATGYPLAEVSWPNVSVPAN
TSHSRTPEGLYQVTSVLRLKPPPGRNFSCVFWNTHVRELTLASIDLQSQMEPRTHPTGSGDKTHTCPPCPA

[chemical structure]

[chemical structure]

[chemical structure]

LSLSPGKGGGGSGGGGSGGGGSIWELKKDVYVVELDWYPDAPGEMVVLTCDTPEEDGITWTLDQSSEVLGSG

[chemical structure]

TSSFFIRDIKPDPPKNLQLKPLKNSRQVEVSWEYPDTWSTPHSYFSLTFCVQVQGKSKREKKDRVFTDKTSATVIC
RKNASISVRAQDRYYSSSWSEWASVPCSGGGGSGGGGSGGGGSGGGGSGRNLPVATPDPGMFPCLHHSQNLL
RAVSNMLQKARQTLEFYPCTSEEIDHEDITKDKTSTVEACLPLELTKNESCLNSRETSFITNGSCLASRKTSEMMAL
CLSSIYEDLKMYQVEFKTMNAKLLMDPKRQIFLDQNMLAVIDELMQALNENSETVPQKSSLEEPDFYKTKIKLCIL
LHAFRIRAVTIDRVMSYLNAS
SEQ ID NO: 21 (anti-PD-1 Ab VH-CH1-IgG1 Fc mutant2; VH is underlined; hinge is bolded; linker is
bolded and
underlined)QVQLVESGGGVVQPGRSLRLDCKASGITESNSGMHWVRQAPGKGLEWVAVIWYDGSKRYYA
DSVKGRFTISRDNSKNTLFLQMNSLRAEDTAVYYCATNDDYWGQGTLVTVSSASTKGPSVFPLAPSSKSTS
GGTAALGCLVKDYFPEPVTVSWNSGALTSGVHTFPAVLQSSGLYSLSSVVTVPSSSLGTQTYICNVNHKPS

[chemical structure]

PEVKFNWYVDGVEVHNAKTKPREEQYNSTYRVVSVLTVLHQDWLNGKEYKCKVSNKALPAPIEKTISKA

[chemical structure]

LTVDKSRWQQGNVFSCSVMHEALHNHYTQKSLSLSPGK
SEQ ID NO: 22 (anti-PD-1 Ab VH-CHI-N' hinge portion-linker-single-chain IL-12 mutant heterodimer IL-
12B (p40 ES9A/F60A)-linker-IL-12A (wt p35)-C' hinge portion-IgG1 Fc mutant1; VH is underlined; hinge is
bolded; linker is bolded and underlined; IL-12 subunits are italicized)
QVQLVESGGGVVQPGRSLRLDCKASGITFSNSGMHWVRQAPGKGLEWVAVIWYDGSKRYYADSVKGRF
TISRDNSKNTLFLQMNSLRAEDTAVYYCATNDDYWGQGTLVTVSSASTKGPSVFPLAPSSKSTSGGTAALG
CLVKDYFPEPVTVSWNSGALTSGVHTFPAVLQSSGLYSLSSVVTVPSSSLGTQTYICNVNHKPSNTKVDKK

[chemical structure]

DAGQYTCHKGGEVLSHSLLLLHKKEDGIWSTDILKDQKEPKNKTFLRCEAKNYSGRFTCWWLTTISTDLTESVKSS
RGSSDPQGVTCGAATLSAERVRGDNKEYEYSVECQEDSACPAAEESLPIEVMVDAVHKLKYENYTSSFFIRDIIKPD
PPKNLQLKPLKNSRQVEVSWEYPDTWSTPHSYFSLTFCVQVQGKSKREKKDRVFTDKTSATVICRKNASISVRAQD
RYYSSSWSEWASVPCSGGGGSGGGGSGGGGSGGGGSGRNLPVATPDPGMFPCLHHSONLLRAVSNMLQKAR
QTLEFYPCTSEEIDHEDITKDKTSTVEACLPLELTKNESCLNSRETSFITNGSCLASRKTSFMMALCLSSIYEDLKMY
QVEFKTMNAKLLMDPKRQIFLDQNMLAVIDELMQALNENSETVPQKSSLEEPDFYKTKIKLCILLHAFRIRAVTID

[chemical structure]

[chemical structure]

[chemical structure]

NVFSCSVMHEALHNHYTQKSLSLSPGK
SEQ ID NO: 23 (anti-PD-1 Ab VH-CH1-N' hinge portion-linker-single-chain IL-12 mutant heterodimer IL-
12B (p40 F60A)-linker-IL-12A (wt p35)-C' hinge portion-IgG1 Fc mutant1; VH is underlined; hinge is
bolded; linker is bolded and underlined; IL-12 subunits are italicized)
QVQLVESGGGVVOPGRSLRLDCKASGITFSNSGMHWVRQAPGKGLEWVAVIWYDGSKRYYADSVKGRF
TISRDNSKNTLFLQMNSLRAEDTAVYYCATNDDYWGQGTLVTVSSASTKGPSVFPLAPSSKSTSGGTAALG
CLVKDYFPEPVTVSWNSGALTSGVHTFPAVLQSSGLYSLSSVVTVPSSSLGTQTYICNVNHKPSNTKVDKK

[chemical structure]

DAGQYTCHKGGEVLSHSLLLLHKKEDGIWSTDILKDQKEPKNKTFLRCEAKNYSGRFTCWWLTTISTDLTESVKSS
RGSSDPQGVTCGAATLSAERVRGDNKEYEYSVECQEDSACPAAEESLPIEVMVDAVHKLKYENYTSSFFIRDIIKPD
PPKNLOLKPLKNSRQVEVSWEYPDTWSTPHSYFSLTFCVQVQGKSKREKKDRVFTDKTSATVICRKNASISVRAOD
RYYSSSWSEWASVPCSGGGGSGGGGSGGGGSGGGGSGRNLPVATPDPGMFPCLHHSQNLLRAVSNMLQKAR
QTLEFYPCTSEEIDHEDITKDKTSTVEACLPLELTKNESCLNSRETSFITNGSCLASRKTSFMMALCLSSIYEDLKMY
QVEFKTMNAKLLMDPKRQIFLDQNMLAVIDELMQALNENSETVPQKSSLEEPDFYKTKIKLCILLHAFRIRAVTID

[chemical structure]

[chemical structure]

[chemical structure]

NVFSCSVMHEALHNHYTQKSLSLSPGK
SEQ ID NO: 24 (wildtype human PD-L2 extracellular domain-linker-IL-2 mutant R38D/K43E/E61R-hinge-
IgG1 Fc mutant1; PD-L2 is underlined; linker is bolded and underlined; hinge is bolded; IL-2 mutant is
italicized)
LFTVTVPKELYIIEHGSNVTLECNFDTGSHVNLGAITASLQKVENDTSPHRERATLLEEQLPLGKASHIPQV
QVRDEGQYQCIIIYGVAWDYKYLTLKVKASYRKINTHILKVPETDEVELTCQATGYPLAEVSWPNVSVPAN
TSHSRTPEGLYOVTSVLRLKPPPGRNFSCVFWNTHVRELTLASIDLQSQMEPRTHPTGGGGSAPTSSSTKKT

[chemical structure]

[chemical structure]

DTLMISRTPEVTCVVVDVSHEDPEVKFNWYVDGVEVHNAKTKPREEQYNSTYRVVSVLTVLHQDWLNGK

[chemical structure]

[chemical structure]

SEQ ID NO: 25 (wildtype mature human IL-2)
[sequence omitted]
SEQ ID NO: 26 (IL-2 mutant1 R38D/K43E/E61R)

[chemical structure]

LAQSKNFHLRPRDLISNINVIVLELKGSETTFMCEYADETATIVEFLNRWITFCQSIISTLT
SEQ ID NO: 27 (IL-2 mutant2 L18R/Q22E/R38D/K43E/E61R)

[chemical structure]

LAQSKNFHLRPRDLISNINVIVLELKGSETTFMCEYADETATIVEFLNRWITFCQSHISTLT
SEQ ID NO: 28 (IL-2 mutant3 R38D/K43E/E61R/Q126T)

[chemical structure]

[chemical structure]

SEQ ID NO: 29 (IL-2 mutant4 L18R/Q22E/R38D/K43E/E61R/Q126T)

[chemical structure]

[chemical structure]

SEQ ID NO: 30 (IL-2 mutant5 L18R/Q22E/R38D/K43E/E61R/Q126T/S130R)

[chemical structure]

[chemical structure]

SEQ ID NO: 31 (wildtype mature human IFN-α2b)
CDLPQTHSLGSRRTLMLLAQMRKISLFSCLKDRHDFGFPQEEFGNQFQKAETIPVLHEMIQQIFNLFSTKDSS
AAWDETLLDKFYTELYQQLNDLEACVIQGVGVTETPLMKEDSILAVRKYFQRITLYLKEKKYSPCAWEVV
RAEIMRSFSLSTNLQESLRSKE
SEQ ID NO: 32 (IFN-α2b mutant L30A)

[chemical structure]

SAAWDETLLDKFYTELYQQLNDLEACVIQGVGVTETPLMKEDSILAVRKYFORITLYLKEKKYSPCAWEV
VRAEIMRSFSLSTNLQESLRSKE
SEQ ID NO: 33 (IFN-α2b mutant K31A)

[chemical structure]

AAWDETLLDKFYTELYQQLNDLEACVIQGVGVTETPLMKEDSILAVRKYFQRITLYLKEKKYSPCAWEVV
RAEIMRSFSLSTNLQESLRSKE
SEQ ID NO: 34 (IFN-α2b mutant D32A)

[chemical structure]

AAWDETLLDKFYTELYQQLNDLEACVIQGVGVTETPLMKEDSILAVRKYFORITLYLKEKKYSPCAWEVV
RAEIMRSFSLSTNLQESLRSKE
SEQ ID NO: 35 (IFN-α2b mutant R33A)

[chemical structure]

AAWDETLLDKFYTELYQQLNDLEACVIQGVGVTETPLMKEDSILAVRKYFQRITLYLKEKKYSPCAWEVV
RAEIMRSFSLSTNLQESLRSKE
SEQ ID NO: 36 (IFN-α2b mutant H34A)

[chemical structure]

AAWDETLLDKFYTELYQQLNDLEACVIQGVGVTETPLMKEDSILAVRKYFQRITLYLKEKKYSPCAWEVV
RAEIMRSFSLSTNLQESLRSKE
SEQ ID NO: 37 (IFN-α2b mutant D35A)

[chemical structure]

AAWDETLLDKFYTELYQQLNDLEACVIQGVGVTETPLMKEDSILAVRKYFORITLYLKEKKYSPCAWEVV
RAEIMRSFSLSTNLQESLRSKE
SEQ ID NO: 38 (wildtype mature human IFN-γ monomer)
QDPYVKEAENLKKYFNAGHSDVADNGTLFLGILKNWKEESDRKIMQSQIVSFYFKLFKNFKDDQSIQKSVE
TIKEDMNVKFFNSNKKKRDDFEKLTNYSVTDLNVQRKAIHELIQVMAELSPAAKTGKRKRSQMLFRG
SEQ ID NO: 39 (IFN-γ mutant S20A/D21A monomer)

[chemical structure]

ETIKEDMNVKFFNSNKKKRDDFEKLTNYSVTDLNVQRKAIHELIQVMAELSPAAKTGKRKRSQMLFRG
SEQ ID NO: 40 (IFN-γ mutant V22A/A23S monomer)

[chemical structure]

TIKEDMNVKFFNSNKKKRDDFEKLTNYSVTDLNVQRKAIHELIQVMAELSPAAKTGKRKRSQMLFRG
SEQ ID NO: 41 (IFN-γ mutant A23V monomer)

[chemical structure]

TIKEDMNVKFFNSNKKKRDDFEKLTNYSVTDLNVQRKAIHELIQVMAELSPAAKTGKRKRSQMLFRG
SEQ ID NO: 42 (IFN-γ mutant D24A/N25A monomer)

[chemical structure]

TIKEDMNVKFFNSNKKKRDDFEKLTNYSVTDLNVQRKAIHELIQVMAELSPAAKTGKRKRSQMLFRG
SEQ ID NO: 43 (IFN-γ mutant A23E/D24E/N25K monomer)

[chemical structure]

TIKEDMNVKFFNSNKKKRDDFEKLTNYSVTDLNVQRKAIHELIQVMAELSPAAKTGKRKRSQMLFRG
SEQ ID NO: 44 (IFN-γ mutant A23Q monomer)

[chemical structure]

TIKEDMNVKFFNSNKKKRDDFEKLTNYSVTDLNVQRKAIHELIQVMAELSPAAKTGKRKRSQMLFRG
SEQ ID NO: 45 (IFN-γ mutant D21K monomer)

[chemical structure]

TIKEDMNVKFFNSNKKKRDDFEKLTNYSVTDLNVQRKAIHELIQVMAELSPAAKTGKRKRSQMLFRG
SEQ ID NO: 46 (single-chain ″wildtype″ IFN-7 homodimer; linker is bolded; wildtype IFN-γ monomer is
italicized)
QDPYVKEAENLKKYFNAGHSDVADNGTLFLGILKNWKEESDRKIMQSQIVSFYFKLFKNFKDDQSIQKSVETIKE
DMNVKFFNSNKKKRDDFEKLINYSVTDLNVQRKAIHELIQVMAELSPAAKTGKRKRSQMLERGFEGGGSGGGG
SGGGGSGGGGSQDPYVKEAENLKKYFNAGHSDVADNGTLFLGILKNWKEESDRKIMQSQIVSFYFKLFKNEKD
DQSIQKSVETIKEDMNVKFFNSNKKKRDDFEKLTNYSVTDLNVQRKAIHELIQVMAELSPAAKTGKRKRSQMLFR
G
SEQ ID NO: 47 (single-chain IFN-γ mutant A23V homodimer; linker is bolded; IFN-γ mutant monomer is
italicized)

[chemical structure]

DMNVKFFNSNKKKRDDFEKLTNYSVTDLNVQRKAIHELIQVMAELSPAAKTGKRKRSQMLFRGFEGGGSGGGG

[chemical structure]

DQSIQKSVETIKEDMNVKFFNSNKKKRDDFEKLINYSVTDLNVQRKAIHELIQVMAELSPAAKTGKRKRSQMLFR
G
SEQ ID NO: 48 (nivolumab/Opdivo anti-PD-1 Ab VH)
QVQLVESGGGVVQPGRSLRLDCKASGITFSNSGMHWVRQAPGKGLEWVAVIWYDGSKRYYADSVKGRF
TISRDNSKNTLFLQMNSLRAEDTAVYYCATNDDYWGQGTLVTVSSAS
SEQ ID NO: 49 (nivolumab/Opdivo anti-PD-1 Ab VL)
EIVLTQSPATLSLSPGERATLSCRASQSVSSYLAWYQQKPGQAPRLLIYDASNRATGIPARFSGSGSGTDFTL
TISSLEPEDFAVYYCQQSSNWPRTFGQGTKVEI
SEQ ID NO: 50 (nivolumab/Opdivo anti-PD-1 Ab LC; VL is underlined)
EIVLTQSPATLSLSPGERATLSCRASOSVSSYLAWYQQKPGQAPRLLIYDASNRATGIPARFSGSGSGTDETL
TISSLEPEDFAVYYCQQSSNWPRTFGQGTKVEIKRTVAAPSVFIFPPSDEQLKSGTASVVCLLNNFYPREAKV
QWKVDNALQSGNSQESVTEQDSKDSTYSLSSTLTLSKADYEKHKVYACEVTHQGLSSPVTKSFNRGEC
SEQ ID NO: 51 (anti-PD-1 Ab HC (IgG1 Fc mutant2); VH is underlined; hinge is bolded)
QVQLVESGGGVVQPGRSLRLDCKASGITFSNSGMHWVRQAPGKGLEWVAVIWYDGSKRYYADSVKGRF
TISRDNSKNTLFLQMNSLRAEDTAVYYCATNDDYWGQGTLVTVSSASTKGPSVFPLAPSSKSTSGGTAALG
CLVKDYFPEPVTVSWNSGALTSGVHTFPAVLQSSGLYSLSSVVTVPSSSLGTQTYICNVNHKPSNTKVDKK

[chemical structure]

[chemical structure]

[chemical structure]

FSCSVMHEALHNHYTQKSLSLSPGK
SEQ ID NO: 52 (wildtype mature human IL-10 monomer)
SPGQGTQSENSCTHFPGNLPNMLRDLRDAFSRVKTFFQMKDQLDNLLLKESLLEDFKGYLGCQALSEMIQF
YLEEVMPQAENQDPDIKAHVNSLGENLKTLRLRLRRCHRFLPCENKSKAVEQVKNAFNKLQEKGIYKAMS
EFDIFINYIEAYMTMKIRN
SEQ ID NO: 53 (IL-10 mutant R24A monomer)

[chemical structure]

YLEEVMPQAENQDPDIKAHVNSLGENLKTLRLRLRRCHRFLPCENKSKAVEQVKNAFNKLQEKGIYKAMS
EFDIFINYIEAYMTMKIRN
SEQ ID NO: 54 (IL-10 mutant D25A/L26A monomer)

[chemical structure]

FYLEEVMPQAENQDPDIKAHVNSLGENLKTLRLRLRRCHRFLPCENKSKAVEQVKNAFNKLQEKGIYKAM
SEFDIFINYIEAYMTMKIRN
SEQ ID NO: 55 (IL-10 mutant R27A monomer)

[chemical structure]

YLEEVMPQAENQDPDIKAHVNSLGENLKTLRLRLRRCHRFLPCENKSKAVEQVKNAFNKLQEKGIYKAMS
EFDIFINYIEAYMTMKIRN
SEQ ID NO: 56 (IL-10 mutant D28A/A29S monomer)

[chemical structure]

YLEEVMPQAENQDPDIKAHVNSLGENLKTLRLRLRRCHRFLPCENKSKAVEQVKNAFNKLQEKGIYKAMS
EFDIFINYJEAYMTMKIRN
SEQ ID NO: 57 (IL-10 mutant F30A/S31A monomer)

[chemical structure]

FYLEEVMPQAENQDPDIKAHVNSLGENLKTLRLRLRRCHRFLPCENKSKAVEQVKNAFNKLQEKGIYKAM
SEFDIFINYIEAYMTMKIRN
SEQ ID NO: 58 (IL-10 mutant R32A monomer)

[chemical structure]

YLEEVMPQAENQDPDIKAHVNSLGENLKTLRLRLRRCHRFLPCENKSKAVEQVKNAFNKLQEKGIYKAMS
EFDIFINYIEAYMTMKIRN
SEQ ID NO: 59 (single-chain ″wildtype″ IL-10 homodimer; linker is bolded; wildtype IL-10 monomer is
italicized)
SPGQGTQSENSCTHFPGNLPNMLRDLRDAFSRVKTFFQMKDQLDNLLLKESLLEDFKGYLGCQALSEMIQFYLE
EVMPQAENQDPDIKAHVNSLGENLKTLRLRLRRCHRFLPCENKSKAVEQVKNAFNKLQEKGIYKAMSEFDIFINYI
EAYMTMKIRNFEGGGSGGGGSGGGGSGGGGSSPGQGTQSENSCTHFPGNLPNMLRDLRDAFSRVKTFFQMK
DQLDNLLLKESLLEDFKGYLGCQALSEMIQFYLEEVMPQAENQDPDIKAHVNSLGENLKTLRLRLRRCHRFLPCE
NKSKAVEQVKNAFNKLQEKGIYKAMSEFDIFINYIEAYMTMKIRN
SEQ ID NO: 60 (single-chain IL-10 mutant R27A homodimer; linker is bolded; IL-10 mutant monomer is
italicized)

[chemical structure]

EVMPQAENQDPDIKAHVNSLGENLKTLRLRLRRCHRFLPCENKSKAVEQVKNAFNKLOEKGIYKAMSEFDIFINYI

[chemical structure]

KDQLDNLLLKESLLEDFKGYLGCQALSEMIQFYLEEVMPQAENQDPDIKAHVNSLGENLKTLRLRLRRCHRFLPC
ENKSKAVEQVKNAFNKLQEKGIYKAMSEFDIFINYIEAYMTMKIRN
SEQ ID NO: 61 (wildtype mature human IL-12A (p35) subunit)
RNLPVATPDPGMFPCLHHSQNLLRAVSNMLQKARQTLEFYPCTSEEIDHEDITKDKTSTVEACLPLELTKNE
SCLNSRETSFITNGSCLASRKTSFMMALCLSSIYEDLKMYQVEFKTMNAKLLMDPKRQIFLDQNMLAVIDE
LMQALNFNSETVPQKSSLEEPDFYKTKIKLCILLHAFRIRAVTIDRVMSYLNAS
SEQ ID NO: 62 (wildtype mature human IL-12B (p40) subunit)
IWELKKDVYVVELDWYPDAPGEMVVLTCDTPEEDGITWTLDQSSEVLGSGKTLTIQVKEFGDAGQYTCHK
GGEVLSHSLLLLHKKEDGIWSTDILKDQKEPKNKTFLRCEAKNYSGRFTCWWLTTISTDLTFSVKSSRGSSD
PQGVTCGAATLSAERVRGDNKEYEYSVECQEDSACPAAEESLPIEVMVDAVHKLKYENYTSSFFIRDIIKPD
PPKNLQLKPLKNSRQVEVSWEYPDTWSTPHSYFSLTFCVQVQGKSKREKKDRVFTDKTSATVICRKNASIS
VRAQDRYYSSSWSEWASVPCS
SEQ ID NO: 63 (IL-12B (p40) mutant E59A/F60A sabunit)

[chemical structure]

KGGEVLSHSLLLLHKKEDGIWSTDILKDQKEPKNKTFLRCEAKNYSGRFTCWWLTTISTDLTFSVKSSRGSS
DPQGVTCGAATLSAER VRGDNKEYEYSVECQEDSACPAAEESLPIEVMVDAVHKLKYENYTSSFFIRDIIKP
DPPKNLQLKPLKNSRQVEVSWEYPDTWSTPHSYFSLTFCVQVQGKSKREKKDRVFTDKTSATVICRKNASI
SVRAQDRYYSSSWSEWASVPCS
SEQ ID NO: 64 (IL-12B (p40) mutant E59A subunit)

[chemical structure]

KGGEVLSHSLLLLHKKEDGIWSTDILKDQKEPKNKTFLRCEAKNYSGRFTCWWLTTISTDLTFSVKSSRGSS
DPQGVTCGAATLSAERVRGDNKEYEYSVECQEDSACPAAEESLPIEVMVDAVHKLKYENYTSSFFIRDIIKP
DPPKNLQLKPLKNSRQVEVSWEYPDTWSTPHSYFSLTFCVQVQGKSKREKKDRVFTDKTSATVICRKNASI
SVRAQDRYYSSSWSEWASVPCS
SEQ ID NO: 65 (IL-12B (p40) mutant F60A subunit)

[chemical structure]

KGGEVLSHSLLLLHKKEDGIWSTDILKDQKEPKNKTFLRCEAKNYSGRFTCWWLTTISTDLTFSVKSSRGSS
DPQGVTCGAATLSAERVRGDNKEYEYSVECQEDSACPAAEESLPIEVMVDAVHKLKYENYTSSFFIRDIIKP
DPPKNLQLKPLKNSRQVEVSWEYPDTWSTPHSYFSLTFCVQVQGKSKREKKDRVFTDKTSATVICRKNASI
SVRAQDRYYSSSWSEWASVPCS
SEQ ID NO: 66 (IL-12B (p40) mutant G64A subunit)

[chemical structure]

KGGEVLSHSLLLLHKKEDGIWSTDILKDQKEPKNKTFLRCEAKNYSGRFTCWWLTTISTDLTFSVKSSRGSS
DPQGVTCGAATLSAERVRGDNKEYEYSVECQEDSACPAAEESLPIEVMVDAVHKLKYENYTSSFFIRDIIKP
DPPKNLQLKPLKNSRQVEVSWEYPDTWSTPHSYFSLTFCVQVQGKSKREKKDRVFTDKTSATVICRKNASI
SVRAQDRYYSSSWSEWASVPCS
SEQ ID NO: 67 (single-chain ″wildtype″ IL-12 heterodimer IL-12B (wt p40)-linker-IL-12A (wt p35); linker
is bolded)
IWELKKDVYVVELDWYPDAPGEMVVLTCDTPEEDGITWTLDQSSEVLGSGKTLTIQVKEFGDAGQYTCHKGGEV
LSHSLLLLHKKEDGIWSTDILKDQKEPKNKTFLRCEAKNYSGRFTCWWLTTISTDLTFSVKSSRGSSDPOGVTCGA
ATLSAERVRGDNKEYEYSVECQEDSACPAAEESLPIEVMVDAVHKLKYENYTSSFFIRDIIKPDPPKNLQLKPLKNS
RQVEVSWEYPDTWSTPHSYFSLTFQVQVQGKSKREKKDRVFTDKTSATVICRKNASISVRAQDRYYSSSWSEWASV
PCSGGGGSGGGGSGGGGSGGGGSGRNLPVATPDPGMFPCLHHSQNLLRAVSNMLQKARQTLEFYPCTSEEI
DHEDITKDKISTVEACLPLELTKNESCLNSRETSFITNGSCLASRKTSEMMALCLSSIYEDLKMYQVEFKIMNAKLL
MDPKRQIFLDQNMLAVIDELMQALNENSETVPQKSSLEEPDFYKTKIKLCILLHAFRIRAVTIDRVMSYLNAS
SEQ ID NO: 68 (single-chain IL-12 mutant heterodimer IL-12B (p40 E59A/F60A)-linker-IL-12A (wt p35);
linker is bolded; IL-12 subunits are italicized)

[chemical structure]

LSHSLLLLHKKEDGIWSTDILKDQKEPKNKTFLRCEAKNYSGRFTCWWLTTISTDLTFSVKSSRGSSDPQGVTCGA
ATLSAERVRGDNKEYEYSVECQEDSACPAAEESLPIEVMVDAVHKLKYENYTSSFFIRDIIKPDPPKNLOLKPLKNS
RQVEVSWEYPDTWSTPHSYFSLTFCVQVQGKSKREKKDRVFTDKTSATVICRKNASISVRAQDRYYSSSWSEWASV
PCSGGGGSGGGGSGGGGSGGGGSGRNLPVATPDPGMFPCLHHSQNLLRAVSNMLQKARQTLEFYPCTSEEI
DHEDITKDKTSTVEACLPLELTKNESCLNSRETSFITNGSCLASRKTSFMMALCLSSIYEDLKMYQVEFKTMNAKLL
MDPKROIFLDQNMLAVIDELMQALNENSETVPOKSSLEEPDFYKTKIKLCILLHAFRIRAVTIDRVMSYLNAS
SEQ ID NO: 69 (single-chain IL-12 mutant heterodimer IL-12B (p40 E59A)-linker-IL-12A (wt p35); linker is
bolded and underlined; IL-12 subunits are italicized)

[chemical structure]

VLSHSLLLLHKKEDGIWSTDILKDQKEPKNKTFLRCEAKNYSGRFTCWWLTTISTDLTFSVKSSRGSSDPQGVTCG
AATLSAERVRGDNKEYEYSVECQEDSACPAAEESLPIEVMVDAVHKLKYENYTSSFFIRDIIKPDPPKNLQLKPLKN
SRQVEVSWEYPDTWSTPHSYFSLTFCVQVQGKSKREKKDRVFTDKTSATVICRKNASISVRAQDRYYSSSWSEWAS
VPCSGGGGSGGGGSGGGGSGGGGSGRNLPVATPDPGMFPCLHHSQNLLRAVSNMLQKARQTLEFYPCTSEE
IDHEDITKDKTSTVEACLPLELTKNESCLNSRETSFITNGSCLASRKTSFMMALCLSSIYEDLKMYOVEFKTMNAKL
LMDPKRQIFLDQNMLAVIDELMQALNENSETVPQKSSLEEPDFYKTKIKLCILLHAFRIRAVTIDRVMSYLNAS
SEQ ID NO: 70 (single-chain IL-12 mutant heterodimer IL-12B (p40 G64A)-linker-IL-12A (wt p35); linker
is bolded and underlined; IL-12 subunits are italicized)

[chemical structure]

LSHSLLLLHKKEDGIWSTDILKDOKEPKNKTFLRCEAKNYSGRFTCWWLTTISTDLTFSVKSSRGSSDPQGVTCGA
ATLSAERVRGDNKEYEYSVECQEDSACPAAEESLPIEVMVDAVHKLKYENYTSSFFIRDIIKPDPPKNLQLKPLKNS
RQVEVSWEYPDTWSTPHSYFSLTFCVQVQGKSKREKKDRVFTDKTSATVICRKNASISVRAQDRYYSSSWSEWASV
PCSGGGGSGGGGSGGGGSGGGGSGRNLPVATPDPGMFPCLHHSQNLLRAVSNMLQKARQTLEFYPCTSEEI
DHEDITKDKTSTVEACLPLELTKNESCLNSRETSFITNGSCLASRKTSEMMALCLSSIYEDLKMYOVEFKTMNAKLL
MDPKRQIFLDQNMLAVIDELMQALNENSETVPOKSSLEEPDFYKTKIKLCILLHAFRIRAVTIDRVMSYLNAS
SEQ ID NO: 71 (single-chain IL-12 mutant heterodimer IL-12B (p40 F60A)-linker-IL-12A (wt p35); linker
is bolded; IL-12 subunits are italicized)

[chemical structure]

LSHSLLLLHKKEDGIWSTDILKDQKEPKNKTFLRCEAKNYSGRFTCWWLTTISTDLTFSVKSSRGSSDPOGVTCGA
ATLSAERVRGDNKEYEYSVECQEDSACPAAEESLPIEVMVDAVHKLKYENYTSSFFIRDIIKPDPPKNLQLKPLKNS
RQVEVSWEYPDTWSTPHSYFSLTFCVQVQGKSKREKKDRVFTDKTSATVICRKNASISVRAQDRYYSSSWSEWASV
PCSGGGGSGGGGSGGGGSGGGGSGRNLPVATPDPGMFPCLHHSONLLRAVSNMLQKAROTLEFYPCTSEEI
DHEDITKDKTSTVEACLPLELTKNESCLNSRETSFITNGSCLASRKTSEMMALCLSSIYEDLKMYQVEFKTMNAKLL
MDPKRQIFLDQNMLAVIDELMQALNFNSETVPQKSSLEEPDFYKTKIKLCILLHAFRIRAVTIDRVMSYLNAS
SEQ ID NO: 72 (mouse single-chain mutant heterodimer IL-12B (E59A/F60A)-linker-IL-12A (wt p35); linker
is bolded and underlined; mouse IL-12 subunits are italicized)

[chemical structure]

TLSHSHLLLHKKENGIWSTEILKNEKNKTFLKCEAPNYSGRFTCSWLVQRNMDLKFNIKSSSSSPDSRAVTCGMAS
LSAEKVTLDQRDYEKYSVSCQEDVTCPTAEETLPIELALEARQQNKYENYSTSFFIRDIIKPDPPKNLQMKPLKNSQ
VEVSWEYPDSWSTPHSYFSLKFFVRIQRKKEKMKETEEGCNQKGAFLVEKTSTEVQCKGGNVCVQAQDRYYNSS
CSKWACVPCRVRSGGPGGGGSGGGSGGGGSGRVIPVSGPARCLSQSRNLLKTTDDMVKTAREKLKHYSCTAE
DIDHEDITRDQTSTLKTCLPLELHKNESCLATRETSSTTRGSCLPPQKTSLMMTLCLGSIYEDLKMYQTEFQAINAA
LQNHNHQQIILDKGMLVAIDELMQSLNHNGETLRQKPPVGEADPYRVKMKLCILLHAFSTRVVTINRVMGYLSSA
SEQ ID NO: 73 (wildtype mature human IL-23A (p19) subunit)
RAVPGGSSPAWTQCQQLSQKLCTLAWSAHPLVGHMDLREEGDEETTNDVPHIQCGDGCDPQGLRDNSQF
CLQRIHQGLIFYEKLLGSDIFTGEPSLLPDSPVGQLHASLLGLSQLLQPEGHHWETQQIPSLSPSQPWQRLLL
RFKILRSLQAFVAVAARVFAHGAATLSP
SEQ ID NO: 74 (single-chain ″wildtype″ IL-23 heterodimer IL-12B (wt p40)-linker-IL-23A (wt p19); linker
is bolded; IL-23 subunits are italicized)
IWELKKDVYVVELDWYPDAPGEMVVLTCDTPEEDGITWTLDQSSEVLGSGKTLTIQVKEFGDAGQYTCHKGGEV
LSHSLLLLHKKEDGIWSTDILKDQKEPKNKTFLRCEAKNYSGRFTCWWLTTISTDLTFSVKSSRGSSDPQGVTCGA
ATLSAERVRGDNKEYEYSVECQEDSACPAAEESLPIEVMVDAVHKLKYENYTSSFFIRDIIKPDPPKNLOLKPLKNS
RQVEVSWEYPDTWSTPHSYFSLTFCVQVQGKSKREKKDRVFTDKTSATVICRKNASISVRAODRYYSSSWSEWASV
PCSGGGGSGGGGSGGGGSGGGGSGRAVPGGSSPAWTQCQQLSQKLCTLAWSAHPLVGHMDLREEGDEETT
NDVPHIQCGDGCDPQGLRDNSQFCLQRIHQGLIFYEKLLGSDIFTGEPSLLPDSPVGQLHASLLGLSOLLOPEGH
HWETQQIPSLSPSQPWORLLLRFKILRSLQAFVAVAARVFAHGAATLSP
SEQ ID NO: 75 (single-chain IL-23 mutant heterodimer IL-12B (p40 E59A/F60A)-linker-IL-23A (wt p19);
linker is bolded; IL-23 subunits are italicized)

[chemical structure]

LSHSLLLLHKKEDGIWSTDILKDQKEPKNKTFLRCEAKNYSGRFTCWWLTTISTDLTFSVKSSRGSSDPQGVTCGA
ATLSAERVRGDNKEYEYSVECQEDSACPAAEESLPIEVMVDAVHKLKYENYTSSFFIRDIIKPDPPKNLQLKPLKNS
RQVEVSWEYPDTWSTPHSYFSLIFCVQVQGKSKREKKDRVFTDKTSATVICRKNASISVRAQDRYYSSSWSEWASV
PCSGGGGSGGGGSGGGGSGGGGSGRAVPGGSSPAWTQCQQLSQKLCTLAWSAHPLVGHMDLREEGDEETT
NDVPHIQCGDGCDPQGLRDNSQFCLORIHQGLIFYEKLLGSDIFTGEPSLLPDSPVGQLHASLLGLSOLLQPEGH
HWETQQIPSLSPSQPWQRLLLRFKILRSLQAFVAVAARVFAHGAATLSP
SEQ ID NO: 76 (hinge)
EPKSCDKTHTCPPCPAPELLGGP
SEQ ID NO: 77 (hinge)

[chemical structure]

SEQ ID NO: 78 (hinge)

[chemical structure]

SEQ ID NO: 79 (hinge)

[chemical structure]

SEQ ID NO: 80 (hinge)

[chemical structure]

SEQ ID NO: 81 (hinge)

[chemical structure]

SEQ ID NO: 82 (hinge)
ERKCCVECPPCPAPPVAGP
SEQ ID NO: 83 (hinge)
ESKYGPPCPSCPAPEFLGGP
SEQ ID NO: 84 (hinge, e.g., hinge N' portion)
EPKSCDK
SEQ ID NO: 85 (hinge, e.g., hinge N' portion)
EPKSC
SEQ ID NO: 86 (hinge, e.g., hinge C' portion)
DKTHTCPPCPAPELLGGP
SEQ ID NO: 87 (hinge, e.g., hinge C' portion)

[chemical structure]

SEQ ID NO: 88 (hinge, e.g., hinge C' portion)

[chemical structure]

SEQ ID NO: 89 (hinge)
DKTHT
SEQ ID NO: 90 (hinge, e.g., hinge N' portion)

[chemical structure]

SEQ ID NO: 91 (hinge)

[chemical structure]

SEQ ID NO: 92 (hinge)

[chemical structure]

SEQ ID NO: 93 (hinge)

[chemical structure]

SEQ ID NO: 94 (hinge)
ESKYGPPCPPCPAPEFLGGP
SEQ ID NO: 95 (hinge)

[chemical structure]

SEQ ID NO: 96 (wildtype human IgG1 Fc)
SVFLFPPKPKDTLMISRTPEVTCVVVDVSHEDPEVKFNWYVDGVEVHNAKTKPREEQYNSTYRVVSVLTV
LHQDWLNGKEYKCKVSNKALPAPIEKTISKAKGQPREPQVYTLPPSRDELTKNQVSLTCLVKGFYPSDIAV
EWESNGQPENNYKTTPPVLDSDGSFFLYSKLTVDKSRWQQGNVFSCSVMHEALHNHYTQKSLSLSPGK
SEQ ID NO: 97 (IgG1 Fc mutant1 T350V/L351Y/S400E/F405A/Y407V)
SVFLFPPKPKDTLMISRTPEVTCVVVDVSHEDPEVKFNWYVDGVEVHNAKTKPREEQYNSTYRVVSVLTV

[chemical structure]

[chemical structure]

SEQ ID NO: 98 (IgG1 Fc mutant2 T350V/T366L/N390R/K392M/T394W)
SVFLFPPKPKDTLMISRTPEVTCVVVDVSHEDPEVKFNWYVDGVEVHNAKTKPREEQYNSTYRVVSVLTV

[chemical structure]

[chemical structure]

SEQ ID NO: 99 (wildtype human IgG4 Fc)
SVFLFPPKPKDTLMISRTPEVTCVVVDVSQEDPEVQFNWYVDGVEVHNAKTKPREEQFNSTYRVVSVLTVL
HQDWLNGKEYKCKVSNKGLPSSIEKTISKAKGQPREPQVYTLPPSQEEMTKNQVSLTCLVKGFYPSDIAVE
WESNGQPENNYKTTPPVLDSDGSFFLYSRLTVDKSRWQEGNVFSCSVMHEALHNHYTQKSLSLSLGK
SEQ ID NO: 100 (IgG1 Fc mutant)

[chemical structure]

LHQDWLNGKEYKCKVSNKALPAPIEKTISKAKGQPREPQVYTLPPSRDELTKNQVSLTCLVKGFYPSDIAV
EWESNGQPENNYKTTPPVLDSDGSFFLYSKLTVDKSRWQQGNVFSCSVMHEALHNHYTQKSLSLSPGK
SEQ ID NO: 101 (IgG1 Fc mutant)

[chemical structure]

[chemical structure]

EWESNGQPENNYKTTPPVLDSDGSFFLYSKLTVDKSRWQQGNVFSCSVMHEALHNHYTQKSLSLSPGK
SEQ ID NO: 102 (IgG1 Fc mutant)
SVFLFPPKPKDTLMISRTPEVTCVVVDVSHEDPEVKFNWYVDGVEVHNAKTKPREEQYNSTYRVVSVLTV

[chemical structure]

EWESNGQPENNYKTTPPVLDSDGSFFLYSKLTVDKSRWQQGNVFSCSVMHEALHNHYTQKSLSLSPGK
SEQ ID NO: 103 (anti-PD-1 Ab HC (IgG1 Fc mutant); VH is underlined)
QVQLVESGGGVVQPGRSLRLDCKASGITESNSGMHWVRQAPGKGLEWVAVIWYDGSKRYYADSVKGRF
TISRDNSKNTLFLQMNSLRAEDTAVYYCATNDDYWGQGTLVTVSSASTKGPSVFPLAPSSKSTSGGTAALG
CLVKDYFPEPVTVSWNSGALTSGVHTFPAVLQSSGLYSLSSVVTVPSSSLGTQTYICNVNHKPSNTKVDKK
VEPKSCDKTHTCPPCPAPELLGGPSVFLFPPKPKDTLMISRTPEVTCVVVDVSHEDPEVKFNWYVDGVEV
HNAKTKPREEQYASTYRVVSVLTVLHQDWLNGKEYKCKVSNKALPAPIEKTISKAKGQPREPQVYTLPPSR
DELTKNQVSLTCLVKGFYPSDIAVEWESNGQPENNYKTTPPVLDSDGSFFLYSKLTVDKSRWQQGNVFSCS
VMHEALHNHYTQKSLSLSPGK
SEQ ID NO: 104 (nivolumab/Opdivo anti-PD-1 Ab HC; VH is underlined; hinge is bolded)
QVQLVESGGGVVQPGRSLRLDCKASGITFSNSGMHWVRQAPGKGLEWVAVIWYDGSKRYYADSVKGRF
TISRDNSKNTLFLQMNSLRAEDTAVYYCATNDDYWGQGTLVTVSSASTKGPSVFPLAPCSRSTSESTAALG
CLVKDYFPEPVTVSWNSGALTSGVHTFPAVLQSSGLYSLSSVVTVPSSSLGTKTYTCNVDHKPSNTKVDKR
VESKYGPPCPPCPAPEFLGGPSVFLFPPKPKDTLMISRTPEVTCVVVDVSQEDPEVQFNWYVDGVEVHNA
KTKPREEQFNSTYRVVSVLTVLHQDWLNGKEYKCKVSNKGLPSSIEKTISKAKGQPREPQVYTLPPSQEEM
TKNQVSLTCLVKGFYPSDIAVEWESNGQPENNYKTTPPVLDSDGSFFLYSRLTVDKSRWQEGNVFSCSVM
HEALHNHYTQKSLSLSLGK
SEQ ID NO: 105 (wildtype human PD-L2; signal peptide is italicized; extracellular domain is
underlined; cytoplasmic domain is bolded)
MIFLLLMLSLELQLHQIAALFTVTVPKELYIIEHGSNVTLECNEDTGSHVNLGAITASLQKVENDTSPHRERAT
LLEEQLPLGKASFHIPQVQVRDEGQYQCIIIGVAWDYKYLTLKVKASYRKINTHILKVPETDEVELTCQAT
GYPLAEVSWPNVSVPANTSHSRTPEGLYQVTSVLRLKPPPGRNFSCVFWNTHVRELTLASIDLQSQMEPRT
HPTWLLHIFIPFCHIAFIFIATVIALRKQLCQKLYSSKDTTKRPVTTTKREVNSAI
SEQ ID NO: 106 (wildtype human PD-L2 extracellular domain)
LFTVTVPKELYJEHGSNVTLECNFDTGSHVNLGAITASLOKVENDTSPHRERATLLEEQLPLGKASFHIPQV
QVRDEGQYQCIIIYGVAWDYKYLTLKVKASYRKINTHILKVPETDEVELTCQATGYPLAEVSWPNVSVPAN
TSHSRTPEGLYQVTSVLRLKPPPGRNFSCVFWNTHVRELTLASIDLQSQMEPRTHPT
SEQ ID NO: 107 (human PD-L2 extracellular domain mutant1 T56V)

[chemical structure]

QVRDEGQYQCIIIYGVAWDYKYLTLKVKASYRKINTHILKVPETDEVELTCQATGYPLAEVSWPNVSVPAN
TSHSRTPEGLYQVTSVLRLKPPPGRNFSCVFWNTHVRELTLASIDLQSQMEPRTHPT
SEQ ID NO: 108 (human PD-L2 extracellular domain motant2 S58V)

[chemical structure]

QVRDEGQYQCIIIYGVAWDYKYLTLKVKASYRKINTHILKVPETDEVELTCQATGYPLAEVSWPNVSVPAN
TSHSRTPEGLYQVTSVLRLKPPPGRNFSCVFWNTHVRELTLASIDLQSQMEPRTHPT
SEQ ID NO: 109 (human PD-L2 extracellular domain mutant3 Q60L)

[chemical structure]

QVRDEGQYQCHIIYGVAWDYKYLTLKVKASYRKINTHILKVPETDEVELTCQATGYPLAEVSWPNVSVPAN
TSHSRTPEGLYQVTSVLRLKPPPGRNFSCVFWNTHVRELTLASIDLQSQMEPRTHPT
SEQ ID NO: 110 (human PD-L2 extracellular domain mutant4 T56V/S58V/Q60L)

[chemical structure]

VQVRDEGQYQCIIIYGVAWDYKYLTLKVKASYRKINTHILKVPETDEVELTCQATGYPLAEVSWPNVSVPA
NTSHSRTPEGLYQVTSVLRLKPPPGRNFSCVFWNTHVRELTLASIDLQSQMEPRTHPT
SEQ ID NO: 111 (wildtype human PD-L2 extracellular domain-hinge-IgG1 Fc mutant; PD-L2 extracellular
domain is underlined; hinge is bolded)
LFTVTVPKELYIIEHGSNVTLECNEDTGSHVNLGAITASLQKVENDTSPHRERATLLEEQLPLGKASFHIPOV
QVRDEGQYQCIIIYGVAWDYKYLTLKVKASYRKINTHILKVPETDEVELTCQATGYPLAEVSWPNVSVPAN
TSHSRTPEGLYQVTSVLRLKPPPGRNFSCVFWNTHVRELTLASIDLQSQMEPRTHPTDKTHTCPPCPAPEL
LGGPSVFLFPPKPKDTLMISRTPEVTCVVVDVSHEDPEVKFNWYVDGVEVHNAKTKPREEQYASTYRVVS
VLTVLHQDWLNGKEYKCKVSNKALPAPIEKTISKAKGQPREPQVYTLPPSRDELTKNQVSLTCLVKGFYPS
DIAVEWESNGQPENNYKTTPPVLDSDGSFFLYSKLTVDKSRWQQGNVFSCSVMHEALHNHYTQKSLSLSP
GK
SEQ ID NO: 112 (wildtype human PD-L2 extracellular domain-hinge-IgG1 Fc mutant2; PD-L2 extracellular
domain is underlined; hinge is bolded)
LFTVTVPKELYIIEHGSNVTLECNEDTGSHVNLGAITASLQKVENDTSPHRERATLLEEQLPLGKASFHIPQV
QVRDEGQYQCIIIYGVAWDYKYLTLKVKASYRKINTHILKVPETDEVELTCQATGYPLAEVSWPNVSVPAN

[chemical structure]

[chemical structure]

[chemical structure]

[chemical structure]

SPGK
SEQ ID NO: 113 (wildtype human PD-L2 extracellular domain-hinge-IgG1 Fc mutant2; PD-L2 extracellular
domain is underlined; linker is bolded and underlined; hinge is bolded)
LFTVTVPKELYIIEHGSNVTLECNEDTGSHVNLGAITASLQKVENDTSPHRERATLLEEQLPLGKASFHIPQV
QVRDEGQYQCIIIYGVAWDYKYLTLKVKASYRKINTHILKVPETDEVELTCQATGYPLAEVSWPNVSVPAN
TSHSRTPEGLYQVTSVLRLKPPPGRNFSCVFWNTHVRELTLASIDLQSQMEPRTHPTGGGGSDKTHTCPPC

[chemical structure]

[chemical structure]

[chemical structure]

KSLSLSPGK
SEQ ID NO: 114 (wildtype human PD-L2 extracellular domain-linker-hinge-IgG1 Fc mutant2; PD-L2
extracellular domain is underlined; linker is bolded and underlined; hinge is bolded)
LFTVTVPKELYIIEHGSNVTLECNEDTGSHVNLGAITASLQKVENDTSPHRERATLLEEQLPLGKASFHIPQV
QVRDEGQYQCIIIYGVAWDYKYLTLKVKASYRKINTHILKVPETDEVELTCQATGYPLAEVSWPNVSVPAN
TSHSRTPEGLYQVTSVLRLKPPPGRNFSCVFWNTHVRELTLASIDLQSQMEPRTHPTGSGGGGGDKTHTC

[chemical structure]

[chemical structure]

[chemical structure]

YTQKSLSLSPGK
SEQ ID NO: 115 (wildtype human PD-L2 extracellular domain-hinge-IgG1 Fe mutant2; PD-L2 extracellular
domain is underlined; hinge is bolded; linker is bolded and underlined)
LFTVTVPKELYIIEHGSNVTLECNFDTGSHVNLGAITASLQKVENDTSPHRERATLLEEQLPLGKASFHIPQV
QVRDEGQYQCIIIYGVAWDYKYLTLKVKASYRKINTHILKVPETDEVELTCQATGYPLAEVSWPNVSVPAN
TSHSRTPEGLYQVTSVLRLKPPPGRNFSCVFWNTHVRELTLASIDLQSQMEPRTHPTGSGDKTHTCPPCPA

[chemical structure]

[chemical structure]

[chemical structure]

LSLSPGK
SEQ ID NO: 116 (human PD-L2 extracellular domain mutant2 S58V extracellular domain-linker-hinge-IgG1
Fc mutant1; PD-L2 extracellular domain is underlined; linker is bolded and underlined; hinge is bolded)

[chemical structure]

QVRDEGQYQCIIIYGVAWDYKYLTLKVKASYRKINTHILKVPETDEVELTCQATGYPLAEVSWPNVSVPAN
TSHSRTPEGLYQVTSVLRLKPPPGRNESCVFWNTHVRELTLASIDLQSQMEPRTHPTGGGGSGGGDKTHT

[chemical structure]

[chemical structure]

[chemical structure]

HYTQKSLSLSPGK
SEQ ID NO: 117 (buman PD-L2 extracellular domain mutant4 T56V/S58V/Q60L extracellular domain-
linker-hinge-IgG1 Fc mutant1; PD-L2 extracellular domain is underlined; linker is bolded and underlined;
hinge is bolded)

[chemical structure]

VQVRDEGQYQCIIIYGVAWDYKYLTLKVKASYRKINTHILKVPETDEVELTCQATGYPLAEVSWPNVSVPA
NTSHSRTPEGLYQVTSVLRLKPPPGRNFSCVFWNTHVRELTLASIDLQSQMEPRTHPTGGGGSGGGDKTH

[chemical structure]

[chemical structure]

[chemical structure]

NHYTQKSLSLSPGK
SEQ ID NO: 118 (human PD-L2 extracellular domain mutant2 858V extracellular domain-linker-hinge-IgG1
Fc mutant2; PD-L2 extracellular domain is underlined; linker is bolded and underlined; hinge is bolded)

[chemical structure]

QVRDEGQYQCIIIYGVAWDYKYLTLKVKASYRKINTHILKVPETDEVELTCOATGYPLAEVSWPNVSVPAN
TSHSRTPEGLYQVTSVLRLKPPPGRNESCVFWNTHVRELTLASIDLQSQMEPRTHPTGGGGSGGGDKTHT

[chemical structure]

[chemical structure]

[chemical structure]

HYTQKSLSLSPGK
SEQ ID NO: 119 (human PD-L2 extracellular domain mutant4 TS6V/S58V/Q60L extracellular domain-
linker- hinge-IgG1 Fc mutant2; PD-L2 extracellular domain is underlined; linker is bolded and
underlined; hinge is bolded)

[chemical structure]

VQVRDEGQYQCIIIYGVAWDYKYLTLKVKASYRKINTHILKVPETDEVELTCQATGYPLAEVSWPNVSVPA
NTSHSRTPEGLYQVTSVLRLKPPPGRNFSCVFWNTHVRELTLASIDLOSOMEPRTHPTGGGGSGGGDKTH

[chemical structure]

[chemical structure]

[chemical structure]

NHYTQKSLSLSPGK
SEQ ID NO: 120 (wildtype human PD-L1; signal peptide is italicized; extracellular domain is
underlined; cytoplasmic domain is bolded)
MRIFAVFIFMTYWHLLNAFTVTVPKDLYVVEYGSNMTIECKFPVEKOLDLAALIVYWEMEDKNIIQFVHGEE
DLKVQHSSYRQRARLLKDQLSLGNAALQITDVKLQDAGVYRCMISYGGADYKRITVKVNAPYNKINQRIL
VVDPVTSEHELTCQAEGYPKAEVIWTSSDHQVLSGKTTTTNSKREEKLFNVTSTLRINTTTNEIFYCTFRRL
DPEENHTAELVIPELPLAHPPNERTHLVILGAILLCLGVALTFIFRLRKGRMMDVKKCGIQDTNSKKQSDT
HLEET
SEQ ID NO: 121 (wildtype human PD-L1 extracellular domain)
FTVTVPKDLYVVEYGSNMTIECKFPVEKQLDLAALIVYWEMEDKNIIQFVHGEEDLKVQHSSYRQRARLL
KDQLSLGNAALQITDVKLQDAGVYRCMISYGGADYKRITVKVNAPYNKINQRILVVDPVTSEHELTCQAE
GYPKAEVIWTSSDHQVLSGKTTTTNSKREEKLFNVTSTLRINTTTNEIFYCTFRRLDPEENHTAELVIPELPL
AHPPNER
SEQ ID NO: 122 (human PD-L1 extracellular domain mutant1 E58M/R113T/M115L/S117A/G119K)

[chemical structure]

[chemical structure]

GYPKAEVIWTSSDHQVLSGKTTTTNSKREEKLFNVTSTLRINTTTNEIFYCTFRRLDPEENHTAELVIPELPL
AHPPNER
SEQ ID NO: 123 (human PD-L1 extracellular domain mutant2 154Q/E58M/R113T/M115L/S117A/G119K)

[chemical structure]

[chemical structure]

EGYPKAEVIWTSSDHQVLSGKTTTTNSKREEKLFNVTSTLRINTTTNEIFYCTFRRLDPEENHTAELVIPELPL
AHPPNER
SEQ ID NO: 124 (human PD-L1 extracellular domain mutant3 IS4Q/R113T/M115L/S117A/G119K)

[chemical structure]

[chemical structure]

GYPKAEVIWTSSDHQVLSGKTTTTNSKREEKLFNVTSTLRINTTTNEIFYCTFRRLDPEENHTAEL VIPELPL
AHPPNER
SEQ ID NO: 125 (human PD-L1 extracellular domain mutant4 I54Q/E58M/M115L/S117A/G119K)

[chemical structure]

[chemical structure]

EGYPKAEVIWTSSDHQVLSGKTTTTNSKREEKLFNVTSTLRINTTTNEIFYCTFRRLDPEENHTAEL VIPELPL
AHPPNER
SEQ ID NO: 126 (human PD-L1 extracellular domain mutant5 IS4Q/E58M/R113T/S117A/G119K)

[chemical structure]

[chemical structure]

EGYPKAEVIWTSSDHQVLSGKTTTTNSKREEKLFNVTSTLRINTTTNEIFYCTFRRLDPEENHTAEL VIPELPL
AHPPNER
SEQ ID NO: 127 (human PD-L1 extracellular domain mutant6 154Q/E58M/R113T/M115L/G119K)

[chemical structure]

[chemical structure]

GYPKAEVIWTSSDHQVLSGKTTTTNSKREEKLFNVTSTLRINTTTNEIFYCTFRRLDPEENHTAELVIPELPL
AHPPNER
SEQ ID NO: 128 (human PD-L1 extracellular domain mutant7 154Q/E58M/R113T/M115L/S117A)

[chemical structure]

[chemical structure]

EGYPKAEVIWTSSDHQVLSGKTTTTNSKREEKLFNVTSTLRINTTTNEIFYCTFRRLDPEENHTAEL VIPELPL
AHPPNER
SEQ ID NO: 129 (human PD-L1 extracellular domain mutant8
154Q/Y56F/E58M/R113T/M115L/S117A/G119K)

[chemical structure]

[chemical structure]

EGYPKAEVIWTSSDHQVLSGKTTTTNSKREEKLFNVTSTLRINTTTNEIFYCTFRRLDPEENHTAELVIPELPL
AHPPNER
SEQ ID NO: 130 (wildtype human PD-L1 extracellular domain-linker-hinge-IgG1 Fc mutant1; PD-L1
extracellular domain is underlined; linker is bolded and underlined; hinge is bolded)
FTVTVPKDLYVVEYGSNMTIECKFPVEKQLDLAALIVYWEMEDKNIIQFVHGEEDLKVQHSSYRQRARLL
KDQLSLGNAALQITDVKLQDAGVYRCMISYGGADYKRITVKVNAPYNKINQRILVVDPVTSEHELTCQAE
GYPKAEVIWTSSDHQVLSGKTTTTNSKREEKLFNVTSTLRINTTTNEIFYCTFRRLDPEENHTAELVIPELPL

[chemical structure]

NWYVDGVEVHNAKTKPREEQYNSTYRVVSVLTVLHQDWLNGKEYKCKVSNKALPAPIEKTISKAKGQPR

[chemical structure]

SRWQQGNVFSCSVMHEALHNHYTQKSLSLSPGK
SEQ ID NO: 131 (wildtype human PD-L1 extracellular domain-linker-hinge-IgG1 Fc mutant2; PD-L1
extracellular domain is underlined; linker is bolded and underlined; binge is bolded)
FTVTVPKDLYVVEYGSNMTIECKFPVEKQLDLAALIVYWEMEDKNIIQFVHGEEDLKVQHSSYRQRARLL
KDQLSLGNAALQITDVKLQDAGVYRCMISYGGADYKRITVKVNAPYNKINQRILVVDPVTSEHELTCQAE
GYPKAEVIWTSSDHQVLSGKTTTTNSKREEKLFNVTSTLRINTTTNEIFYCTFRRLDPEENHTAELVIPELPL

[chemical structure]

FNWYVDGVEVHNAKTKPREEQYNSTYRVVSVLTVLHQDWLNGKEYKCKVSNKALPAPIEKTISKAKGQP

[chemical structure]

KSRWQQGNVFSCSVMHEALHNHYTQKSLSLSPGK
SEQ ID NO: 132 (human PD-L1 extracellular domain mutant2 I54Q/E58M/R113T/M115L/S117A/G119K
extracellular domain-linker-hinge-IgG1 Fc mutant1; PD-L1 extracellular domain is underlined; linker
is bolded and underlined; hinge is bolded)

[chemical structure]

[chemical structure]

EGYPKAEVIWTSSDHQVLSGKTTTTNSKREEKLFNVTSTLRINTTTNEIFYCTFRRLDPEENHTAELVIPELPL

[chemical structure]

NWYVDGVEVHNAKTKPREEQYNSTYRVVSVLTVLHQDWLNGKEYKCKVSNKALPAPIEKTISKAKGQPR

[chemical structure]

SRWQQGNVFSCSVMHEALHNHYTQKSLSLSPGK
SEQ ID NO: 133 (human PD-L1 extracellular domain matant7 I54Q/E58M/R113T/M115L/S117A
extracellular domain-linker-hinge-IgG1 Fc mutant1; PD-L1 extracellular domain is underlined; linker
is bolded and underlined; hinge is bolded)

[chemical structure]

[chemical structure]

EGYPKAEVIWTSSDHQVLSGKTTTTNSKREEKLFNVTSTLRINTTTNEIFYCTFRRLDPEENHTAELVIPELPL

[chemical structure]

NWYVDGVEVHNAKTKPREEQYNSTYRVVSVLTVLHQDWLNGKEYKCKVSNKALPAPIEKTISKAKGQPR

[chemical structure]

SRWQQGNVFSCSVMHEALHNHYTQKSLSLSPGK
SEQ ID NO: 134 (human PD-L1 extracellular domain mutant2 I54Q/E58M/R113T/M115L/S117A/G119K
extracellular domain-linker-hinge-IgG1 Fc mutant2; PD-L1 extracellular domain is underlined; linker
is bolded and underlined; hinge is bolded)

[chemical structure]

[chemical structure]

EGYPKAEVIWTSSDHQVLSGKTTTTNSKREEKLFNVTSTLRINTTTNEIFYCTFRRLDPEENHTAELVIPELPL

[chemical structure]

FNWYVDGVEVHNAKTKPREEQYNSTYRVVSVLTVLHQDWLNGKEYKCKVSNKALPAPIEKTISKAKGQP

[chemical structure]

KSRWQQGNVFSCSVMHEALHNHYTQKSLSLSPGK
SEQ ID NO: 135 (human PD-L1 extracellular domain mutant7 I54Q/E58M/R113T/M115L/S117A
extracellular domain-linker- hinge-IgG1 Fc mutant2; PD-L1 extracellular domain is underlined; linker
is bolded and underlined; hinge is bolded)

[chemical structure]

[chemical structure]

EGYPKAEVIWTSSDHQVLSGKTTTTNSKREEKLFNVTSTLRINTTTNEIFYCTFRRLDPEENHTAELVIPELPL

[chemical structure]

FNWYVDGVEVHNAKTKPREEQYNSTYRVVSVLTVLHQDWLNGKEYKCKVSNKALPAPIEKTISKAKGQP

[chemical structure]

KSRWQQGNVFSCSVMHEALHNHYTQKSLSLSPGK
SEQ ID NO: 136 (Wild-type human CD155)
MARAMAAAWPLLLVALLVLSWPPPGTGDVVVQAPTQVPGFLGDSVTLPCYLQVPNMEVTHVSQLTWAR
HGESGSMAVFHQTQGPSYSESKRLEFVAARLGAELRNASLRMFGLRVEDEGNYTCLFVTFPQGSRSVDIWL
RVLAKPONTAEVQKVQLTGEPVPMARCVSTGGRPPAQITWHSDLGGMPNTSQVPGFLSGTVTVTSLWILV
PSSQVDGKNVTCKVEHESFEKPQLLTVNLTVYYPPEVSISGYDNNWYLGQNEATLTCDARSNPEPTGYNW
STTMGPLPPFAVAQGAQLLIRPVDKPINTTLICNVTNALGARQAELTVQVKEGPPSEHSGISRNAIIFLVLGIL
VFLILLGIGIYFYWSKCSREVLWHCHLCPSSTEHASASANGHVSYSAVSRENSSSQDPQTEGTR
SEQ ID NO: 137 (Wild-type human CD155 extracellular domain)
WPPPGTGDVVVQAPTQVPGFLGDSVTLPCYLQVPNMEVTHVSQLTWARHGESGSMAVFHQTQGPSYSES
KRLEFVAARLGAELRNASLRMFGLRVEDEGNYTCLFVTFPQGSRSVDIWLRVLAKPONTAEVQKVQLTGE
PVPMARCVSTGGRPPAQITWHSDLGGMPNTSQVPGFLSGTVTVTSLWILVPSSQVDGKNVTCKVEHESFEK
PQLLTVNLTVYYPPEVSISGYDNNWYLGQNEATLTCDARSNPEPTGYNWSTTMGPLPPFAVAQGAQLLIRP
VDKPINTTLICNVTNALGARQAELTVQVKEGPPSEHSGISRN
SEQ ID NO: 138 (human CD155 extracellular domain-linker-hinge-IgG1 Fc mutant1; CD155 extracellular
domain is underlined; linker is bolded and underlined; hinge is bolded)
WPPPGTGDVVVQAPTQVPGFLGDSVTLPCYLQVPNMEVTHVSQLTWARHGESGSMAVFHQTQGPSYSES
KRLEFVAARLGAELRNASLRMFGLRVEDEGNYTCLFVTFPQGSRSVDIWLRVLAKPQNTAEVQKVQLTGE
PVPMARCVSTGGRPPAQITWHSDLGGMPNTSOVPGFLSGTVTVTSLWILVPSSQVDGKNVTCKVEHESFEK
PQLLTVNLTVYYPPEVSISGYDNNWYLGQNEATLTCDARSNPEPTGYNWSTTMGPLPPFAVAQGAQLLIRP

[chemical structure]

FLFPPKPKDTLMISRTPEVTCVVVDVSHEDPEVKFNWYVDGVEVHNAKTKPREEQYNSTYRVVSVLTVLH

[chemical structure]

[chemical structure]

SEQ ID NO: 139 (human CD155 extracellular domain-linker-hinge-IgG1 Fc mutant2; CD155 extracellular
domain is underlined; linker is bolded and underlined; hinge is bolded)
WPPPGTGDVVVQAPTQVPGFLGDSVTLPCYLQVPNMEVTHVSQLTWARHGESGSMAVFHQTQGPSYSES
KRLEFVAARLGAELRNASLRMFGLRVEDEGNYTCLFVTFPQGSRSVDIWLRVLAKPQNTAEVQKVQLTGE
PVPMARCVSTGGRPPAQITWHSDLGGMPNTSQVPGELSGTVTVTSLWILVPSSQVDGKNVTCKVEHESFEK
PQLLTVNLTVYYPPEVSISGYDNNWYLGQNEATLTCDARSNPEPTGYNWSTTMGPLPPFAVAQGAQLLIRP

[chemical structure]

VFLFPPKPKDTLMISRTPEVTCVVVDVSHEDPEVKFNWYVDGVEVHNAKTKPREEQYNSTYRVVSVLTVL

[chemical structure]

[chemical structure]

SEQ ID NO: 140 (IL-12B (p40) mutant F60D subunit)

[chemical structure]

KGGEVLSHSLLLLHKKEDGIWSTDILKDQKEPKNKTFLRCEAKNYSGRFTCWWLTTISTDLTFSVKSSRGSS
DPQGVTCGAATLSAERVRGDNKEYEYSVECQEDSACPAAEESLPIEVMVDAVHKLKYENYTSSFFIRDIIKP
DPPKNLQLKPLKNSRQVEVSWEYPDTWSTPHSYFSLTFCVQVQGKSKREKKDRVFTDKTSATVICRKNASI
SVRAQDRYYSSSWSEWASVPCS
SEQ ID NO: 141 (wildtype human CTLA-4 extracellular domain)
[sequence omitted]
SEQ ID NO: 142 (human PD-L2 extracellular domain hinge portion-linker-single-chain IL-12 mutant
heterodimer IL-12B (p40 F60A)-linker IL-12A (wt p35)-C' hinge portion-IgG1 Fc mutant1; VH is
underlined; hinge is bolded; linker is bolded and underlined; IL-12 subunits are italicized)
LFTVTVPKELYIIEHGSNVTLECNEDTGSHVNLGAITASLQKVENDTSPHRERATLLEEQLPLGKASFHIPQV
QVRDEGQYQCIIIYGVAWDYKYLTLKVKASYRKINTHILKVPETDEVELTCQATGYPLAEVSWPNVSVPAN
TSHSRTPEGLYQVTSVLRLKPPPGRNFSCVFWNTHVRELTLASIDLQSQMEPRTHPTGSGIWELKKDVYVVEL

[chemical structure]

GIWSTDILKDQKEPKNKTFLRCEAKNYSGRFTCWWLTTISTDLTFSVKSSRGSSDPQGVTCGAATLSAERVRGDNK
EYEYSVECQEDSACPAAEESLPIEVMVDAVHKLKYENYTSSFFIRDIIKPDPPKNLQLKPLKNSROVEVSWEYPDTW
STPHSYFSLTFCVQVQGKSKREKKDRVFTDKTSATVICRKNASISVRAQDRYYSSSWSEWASVPCSGGGGSGGGG
SGGGGSGGGGSGRNLPVATPDPGMFPCLHHSQNLLRAVSNMLQKAROTLEFYPCTSEEIDHEDITKDKTSTVE
ACLPLELTKNESCLNSRETSFITNGSCLASRKTSEMMALCLSSIYEDLKMYQVEFKTMNAKLLMDPKRQIFLDQNM

[chemical structure]

GPSVFLFPPKPKDTLMISRTPEVTCVVVDVSHEDPEVKFNWYVDGVEVHNAKTKPREEQYNSTYRVVSVL

[chemical structure]

[chemical structure]

K
SEQ ID NO: 143 (human PD-L2 extracellular domain-linker-hinge portion-IgG1 Fe mutant1-linker-single-
chain IL-12 mutant heterodimer IL-12B (p40 F60A)-linker IL-12A (wt p35); VH is underlined; hinge is
bolded; linker is bolded and underlined; IL-12 subunits are italicized)
LFTVTVPKELYIIEHGSNVTLECNEDTGSHVNLGAITASLQKVENDTSPHRERATLLEEQLPLGKASFHIPQV
QVRDEGQYQCIIIYGVAWDYKYLTLKVKASYRKINTHILKVPETDEVELTCQATGYPLAEVSWPNVSVPAN
TSHSRTPEGLYQVTSVLRLKPPPGRNFSCVFWNTHVRELTLASIDLQSQMEPRTHPTGSGDKTHTCPPCPA

[chemical structure]

[chemical structure]

[chemical structure]

LSLSPGKGGGGSGGGGSGGGGSIWELKKDVYVVELDWYPDAPGEMVVLTCDTPEEDGITWTLDQSSEVLGSG

[chemical structure]

TISTDLTFSVKSSRGSSDPQGVTCGAATLSAERVRGDNKEYEYSVECQEDSACPAAEESLPIEVMVDAVHKLKYENY
TSSFFIRDIIKPDPPKNLOLKPLKNSROVEVSWEYPDTWSTPHSYFSLTFCVQVQGKSKREKKDRVFTDKTSATVIC
RKNASISVRAQDRYYSSSWSEWASVPCSGGGGSGGGGSGGGGSGGGGSGRNLPVATPDPGMFPCLHHSQNLL
RAVSNMLQKARQTLEFYPCTSEEIDHEDITKDKTSTVEACLPLELTKNESCLNSRETSFITNGSCLASRKTSFMMAL
CLSSIYEDLKMYQVEFKTMNAKLLMDPKRQIFLDQNMLAVIDELMQALNENSETVPQKSSLEEPDFYKTKIKLCIL
LHAFRIRAVTIDRVMSYLNAS
SEQ ID NO: 144 (anti-PD-1 Ab VH-CHI-N' hinge portion-IL-2 mutant R38D/K43E/E61R-C' hinge portion-
IgG1 Fc mutant1; VH is underlined; hinge is bolded; IL-2 mutant is italicized)
QVQLVESGGGVVOPGRSLRLDCKASGITESNSGMHWVRQAPGKGLEWVAVIWYDGSKRYYADSVKGRF
TISRDNSKNTLFLQMNSLRAEDTAVYYCATNDDYWGQGTLVTVSSASTKGPSVFPLAPSSKSTSGGTAALG
CLVKDYFPEPVTVSWNSGALTSGVHTFPAVLQSSGLYSLSSVVTVPSSSLGTQTYICNVNHKPSNTKVDKK

[chemical structure]

LEEVLNLAQSKNFHLRPRDLISNINVIVLELKGSETTEMCEYADETATIVEFLNRWITFCOSIISTLTDKTHTCPPCP

[chemical structure]

[chemical structure]

[chemical structure]

SLSLSPGK
SEQ ID NO: 145 (anti-PD-1 Ab VH-CH1-N' hinge portion-linker-single-chain IL-23 mutant heterodimer IL-
12B (p40 E59A/F60A)-linker-IL-23A (wt p19)-C' hinge portion-IgG1 Fc mutant1; VH is underlined; hinge
is bolded; linker is bolded and underlined; IL-23 subunits are italicized)
QVQLVESGGGVVQPGRSLRLDCKASGITESNSGMHWVRQAPGKGLEWVAVIWYDGSKRYYADSVKGREF
TISRDNSKNTLFLQMNSLRAEDTAVYYCATNDDYWGQGTLVTVSSASTKGPSVFPLAPSSKSTSGGTAALG
CLVKDYFPEPVTVSWNSGALTSGVHTFPAVLQSSGLYSLSSVVTVPSSSLGTQTYICNVNHKPSNTKVDKK

[chemical structure]

DAGQYTCHKGGEVLSHSLLLLHKKEDGIWSTDILKDQKEPKNKTFLRCEAKNYSGRFTCWWLTTISTDLTFSVKSS
RGSSDPQGVTCGAATLSAERVRGDNKEYEYSVECQEDSACPAAEESLPIEVMVDAVHKLKYENYTSSFFIRDIIKPD
PPKNLQLKPLKNSRQVEVSWEYPDTWSTPHSYFSLTFCVQVQGKSKREKKDRVFTDKTSATVICRKNASISVRAQD
RYYSSSWSEWASVPCSGGGGSGGGGSGGGGSGGGGSGRAVPGGSSPAWTQCQQLSOKLCTLAWSAHPLVGH
MDLREEGDEETTNDVPHIQCGDGCDPQGLRDNSQFCLQRIHQGLIFYEKLLGSDIFTGEPSLLPDSPVGQLHASL
LGLSQLLQPEGHHWETQQIPSLSPSQPWQRLLLRFKILRSLOAFVAVAARVFAHGAATLSPDKTHTCPPCPAPE

[chemical structure]

[chemical structure]

[chemical structure]

LSPGK
SEQ ID NO: 146 (anti-PD-1 Ab VH-CHI-N' hinge portion-linker-single-chain IL-10 mutant R27A
homodimer-C' hinge portion-IgG1 Fc mutant1; VH is underlined; hinge is bolded; linker is bolded and
underlined; IL-10 mutant monomer is italicized)
QVQLVESGGGVVQPGRSLRLDCKASGITESNSGMHWVRQAPGKGLEWVAVIWYDGSKRYYADSVKGRF
TISRDNSKNTLFLQMNSLRAEDTAVYYCATNDDYWGQGTLVTVSSASTKGPSVFPLAPSSKSTSGGTAALG
CLVKDYFPEPVTVSWNSGALTSGVHTFPAVLQSSGLYSLSSVVTVPSSSLGTQTYICNVNHKPSNTKVDKK

[chemical structure]

GCQALSEMIQFYLEEVMPOAENQDPDIKAHVNSLGENLKTLRLRLRRCHRFLPCENKSKAVEQVKNAFNKLQEK
GIYKAMSEFDIFINYIEAYMTMKIRNFEGGGSGGGGSGGGGSGGGGSSPGQGTQSENSCTHFPGNLPNMLRD

[chemical structure]

TLRLRLRRCHRFLPCENKSKAVEQVKNAFNKLQEKGIYKAMSEFDIFINYIEAYMTMKIRNDKTHTCPPCPAPE

[chemical structure]

[chemical structure]

[chemical structure]

LSPGK
SEQ ID NO: 147 (anti-PD-1 Ab VH-CHI-N' hinge portion-linker-single-chain IFN-γ mutant A23V
bomodimer-C' hinge portion-IgG1 Fc mutant1; VH is underlined; hinge is bolded; linker is bolded and
underlined; IFN-γ mutant monomer is italicized)
QVQLVESGGGVVQPGRSLRLDCKASGITFSNSGMHWVRQAPGKGLEWVAVIWYDGSKRYYADSVKGRF
TISRDNSKNILFLQMNSLRAEDTAVYYCATNDDYWGQGTLVTVSSASTKGPSVFPLAPSSKSTSGGTAALG
CLVKDYFPEPVTVSWNSGALTSGVHTFPAVLQSSGLYSLSSVVTVPSSSLGTQTYICNVNHKPSNTKVDKK

[chemical structure]

DDQSIQKSVETIKEDMNVKFFNSNKKKRDDFEKLINYSVTDLNVQRKAIHELIQVMAELSPAAKTGKRKRSQMLF

[chemical structure]

IVSFYFKLEKNFKDDQSIQKSVETIKEDMNVKFFNSNKKKRDDFEKLINYSVTDLNVQRKAIHELIQVMAELSPAA

[chemical structure]

WYVDGVEVHNAKTKPREEQYNSTYRVVSVLTVLHQDWLNGKEYKCKVSNKALPAPIEKTISKAKGQPRE

[chemical structure]

RWQQGNVFSCSVMHEALHNHYTQKSLSLSPGK
SEQ ID NO: 148 (anti-PD-1 Ab VH-CHI-N' hinge portion-linker-IFN-a2b matant L30A-C' hinge portion-
IgG1 Fc mutant1; VH is underlined; hinge is bolded; linker is bolded and underlined; IFN-a2b mutant is
italicized)
QVQLVESGGGVVQPGRSLRLDCKASGITFSNSGMHWVRQAPGKGLEWVAVIWYDGSKRYYADSVKGRF
TISRDNSKNTLFLOMNSLRAEDTAVYYCATNDDYWGQGTLVTVSSASTKGPSVFPLAPSSKSTSGGTAALG
CLVKDYFPEPVTVSWNSGALTSGVHTFPAVLQSSGLYSLSSVVTVPSSSLGTQTYICNVNHKPSNTKVDKK

[chemical structure]

HEMIQQIFNLFSTKDSSAAWDETLLDKFYTELYQQLNDLEACVIQGVGVTETPLMKEDSILAVRKYFQRITLYLKE

[chemical structure]

VVVDVSHEDPEVKFNWYVDGVEVHNAKTKPREEQYNSTYRVVSVLTVLHQDWLNGKEYKCKVSNKALP

[chemical structure]

[chemical structure]

SEQ ID NO: 149 (anti-PD-1 Ab VH(D100N)-CH1-N' hinge portion-linker-single-chain IL-12 mutant
heterodimer IL-12B (p40 E59A/F60A)-linker IL-12A (wt p35)-C' hinge portion-IgG1 Fc mutant1; VH is
underlined; hinge is bolded; linker is bolded and underlined; IL-12 subunits are italicized)
QVQLVESGGGVVOPGRSLRLDCKASGITFSNSGMHWVRQAPGKGLEWVAVIWYDGSKRYYADSVKGRF

[chemical structure]

CLVKDYFPEPVTVSWNSGALTSGVHTFPAVLQSSGLYSLSSVVTVPSSSLGTQTYICNVNHKPSNTKVDKK

[chemical structure]

DAGQYTCHKGGEVLSHSLLLLHKKEDGIWSTDILKDQKEPKNKTFLRCEAKNYSGRFTCWWLTTISTDLTFSVKSS
RGSSDPQGVTCGAATLSAERVRGDNKEYEYSVECQEDSACPAAEESLPIEVMVDAVHKLKYENYTSSFFIRDIIKPD
PPKNLQLKPLKNSROVEVSWEYPDTWSTPHSYFSLTFCVQVQGKSKREKKDRVFTDKTSATVICRKNASISVRAQD
RYYSSSWSEWASVPCSGGGGSGGGGSGGGGSGGGGSGRNLPVATPDPGMFPCLHHSQNLLRAVSNMLQKAR
QTLEFYPCTSEEIDHEDITKDKTSTVEACLPLELTKNESCLNSRETSFITNGSCLASRKTSFMMALCLSSIYEDLKMY
QVEFKTMNAKLLMDPKRQIFLDQNMLAVIDELMQALNENSETVPQKSSLEEPDFYKTKIKLCILLHAFRIRAVTID

[chemical structure]

[chemical structure]

[chemical structure]

NVFSCSVMHEALHNHYTQKSLSLSPGK
SEQ ID NO: 150 (anti-PD-1 Ab VH(D100G)-CHI-N' hinge portion-linker-single-chain IL-12 mutant
heterodimer IL-12B (p40 E59A/F60A)-linker IL-12A (wt p35)-C' hinge portion-IgG1 Fc mutant1; VH is
underlined; hinge is bolded; linker is bolded and underlined; IL-12 subunits are italicized)
QVQLVESGGGVVQPGRSLRLDCKASGITFSNSGMHWVRQAPGKGLEWVAVIWYDGSKRYYADSVKGRF

[chemical structure]

CLVKDYFPEPVTVSWNSGALTSGVHTFPAVLQSSGLYSLSSVVTVPSSSLGTQTYICNVNHKPSNTKVDKK

[chemical structure]

DAGQYTCHKGGEVLSHSLLLLHKKEDGIWSTDILKDQKEPKNKTFLRCEAKNYSGRFTCWWLTTISTDLTESVKSS
RGSSDPQGVTCGAATLSAERVRGDNKEYEYSVECQEDSACPAAEESLPIEVMVDAVHKLKYENYTSSFFIRDIIKPD
PPKNLQLKPLKNSRQVEVSWEYPDTWSTPHSYFSLTFCVQVQGKSKREKKDRVFTDKTSATVICRKNASISVRAQD
RYYSSSWSEWASVPCSGGGGSGGGGSGGGGSGGGGSGRNLPVATPDPGMFPCLHHSQNLLRAVSNMLQKAR
QTLEFYPCTSEEIDHEDITKDKTSTVEACLPLELTKNESCLNSRETSFITNGSCLASRKTSFMMALCLSSIYEDLKMY
QVEFKTMNAKLLMDPKRQIFLDQNMLAVIDELMQALNENSETVPQKSSLEEPDFYKTKIKLCILLHAFRIRAVTID

[chemical structure]

[chemical structure]

NVFSCSVMHEALHNHYTQKSLSLSPGK
SEQ ID NO: 151 (anti-PD-1 Ab VH(D100R)-CHI-N' hinge portion-linker-single-chain IL-12 mutant
heterodimer IL-12B (p40 E59A/F60A)-linker IL-12A (wt p35)-C' hinge portion-IgG1 Fe mutant1; VH is
underlined; hinge is bolded; linker is bolded and underlined; IL-12 subunits are italicized)
QVQLVESGGGVVOPGRSLRLDCKASGITFSNSGMHWVRQAPGKGLEWVAVIWYDGSKRYYADSVKGRF

[chemical structure]

CLVKDYFPEPVTVSWNSGALTSGVHTFPAVLQSSGLYSLSSVVTVPSSSLGTQTYICNVNHKPSNTKVDKK

[chemical structure]

DAGQYTCHKGGEVLSHSLLLLHKKEDGIWSTDILKDQKEPKNKTFLRCEAKNYSGRFTCWWLTTISTDLTFSVKSS
RGSSDPQGVTCGAATLSAERVRGDNKEYEYSVECQEDSACPAAEESLPIEVMVDAVHKLKYENYTSSFFIRDIIKPD
PPKNLQLKPLKNSRQVEVSWEYPDTWSTPHSYFSLTFCVQVQGKSKREKKDRVFTDKTSATVICRKNASISVRAQD
RYYSSSWSEWASVPCSGGGGSGGGGSGGGGSGGGGSGRNLPVATPDPGMFPCLHHSQNLLRAVSNMLQKAR
QTLEFYPCTSEEIDHEDITKDKTSTVEACLPLELTKNESCLNSRETSFITNGSCLASRKTSEMMALCLSSIYEDLKMY
QVEFKTMNAKLLMDPKRQIFLDQNMLAVIDELMQALNENSETVPQKSSLEEPDFYKTKIKLCILLHAFRIRAVTID

[chemical structure]

[chemical structure]

NVFSCSVMHEALHNHYTQKSLSLSPGK
SEQ ID NO: 152 (anti-PD-1 Ab VH(N99G)-CHI-N' hinge portion-linker-single-chain IL-12 mutant
heterodimer IL-12B (p40 E59A/F60A)-linker IL-12A (wt p35)-C' hinge portion-IgG1 Fc mutant1; VH is
underlined; hinge is bolded; linker is bolded and underlined; IL-12 subunits are italicized)
QVQLVESGGGVVQPGRSLRLDCKASGITFSNSGMHWVRQAPGKGLEWVAVIWYDGSKRYYADSVKGRF

[chemical structure]

CLVKDYFPEPVTVSWNSGALTSGVHTFPAVLQSSGLYSLSSVVTVPSSSLGTQTYICNVNHKPSNTKVDKK

[chemical structure]

DAGQYTCHKGGEVLSHSLLLLHKKEDGIWSTDILKDQKEPKNKTFLRCEAKNYSGRFTCWWLTTISTDLTFSVKSS
RGSSDPQGVTCGAATLSAERVRGDNKEYEYSVECQEDSACPAAEESLPIEVMVDAVHKLKYENYTSSFFIRDIIKPD
PPKNLQLKPLKNSRQVEVSWEYPDTWSTPHSYFSLTFCVQVQGKSKREKKDRVFTDKTSATVICRKNASISVRAQD
RYYSSSWSEWASVPCSGGGGSGGGGSGGGGGGGGSGRNLPVATPDPGMFPCLHHSONLLRAVSNMLQKAR
QTLEFYPCTSEEIDHEDITKDKTSTVEACLPLELTKNESCLNSRETSFITNGSCLASRKTSFMMALCLSSIYEDLKMY
QVEFKTMNAKLLMDPKRQIFLDQNMLAVIDELMQALNENSETVPQKSSLEEPDFYKTKIKLCILLHAFRIRAVTID

[chemical structure]

[chemical structure]

[chemical structure]

NVFSCSVMHEALHNHYTQKSLSLSPGK
SEQ ID NO: 153 (anti-PD-1 Ab VH(N99A)-CH1-N' hinge portion-linker-single-chain IL-12 mutant
heterodimer IL-12B (p40 E59A/F60A)-linker IL-12A (wt p35)-C' hinge portion-IgG1 Fc mutant1; VH is
underlined; hinge is bolded; linker is bolded and underlined; IL-12 subunits are italicized)
QVQLVESGGGVVOPGRSLRLDCKASGITFSNSGMHWVRQAPGKGLEWVAVIWYDGSKRYYADSVKGRF

[chemical structure]

CLVKDYFPEPVTVSWNSGALTSGVHTFPAVLQSSGLYSLSSVVTVPSSSLGTQTYICNVNHKPSNTKVDKK

[chemical structure]

DAGQYTCHKGGEVLSHSLLLLHKKEDGIWSTDILKDOKEPKNKTFLRCEAKNYSGRFTCWWLTTISTDLIFSVKSS
RGSSDPQGVTCGAATLSAERVRGDNKEYEYSVECQEDSACPAAEESLPIEVMVDAVHKLKYENYTSSFFIRDIIKPD
PPKNLQLKPLKNSRQVEVSWEYPDTWSTPHSYFSLTFCVQVQGKSKREKKDRVFTDKTSATVICRKNASISVRAQD
RYYSSSWSEWASVPCSGGGGSGGGGSGGGGSGGGGSGRNLPVATPDPGMFPCLHHSQNLLRAVSNMLQKAR
QTLEFYPCTSEEIDHEDITKDKTSTVEACLPLELTKNESCLNSRETSFITNGSCLASRKTSFMMALCLSSIYEDLKMY
QVEFKTMNAKLLMDPKRQIFLDQNMLAVIDELMQALNFNSETVPQKSSLEEPDFYKTKIKLCILLHAFRIRAVTID

[chemical structure]

[chemical structure]

[chemical structure]

NVFSCSVMHEALHNHYTQKSLSLSPGK
SEQ ID NO: 154 (anti-PD-1 Ab VH(N99M)-CHI-N' hinge portion-linker-single-chain IL-12 mutant
heterodimer IL-12B (p40 ES9A/F60A)-linker IL~12A (wt p35)-C' hinge portion-IgG1 Fc mutant1; VH is
underlined; hinge is bolded; linker is bolded and underlined; IL-12 subunits are italicized)
QVQLVESGGGVVQPGRSLRLDCKASGITFSNSGMHWVRQAPGKGLEWVAVIWYDGSKRYYADSVKGRF

[chemical structure]

GCLVKDYFPEPVTVSWNSGALTSGVHTFPAVLOSSGLYSLSSVVTVPSSSLGTQTYICNVNHKPSNTKVDK

[chemical structure]

GDAGQYTCHKGGEVLSHSLLLLHKKEDGIWSTDILKDOKEPKNKTFLRCEAKNYSGRFTCWWLTTISTDLTFSVK
SSRGSSDPQGVTCGAATLSAERVRGDNKEYEYSVECQEDSACPAAEESLPIEVMVDAVHKLKYENYTSSFFIRDIIK
PDPPKNLQLKPLKNSROVEVSWEYPDTWSTPHSYFSLTFCVQVQGKSKREKKDRVFTDKTSATVICRKNASISVRA
QDRYYSSSWSEWASVPCSGGGGSGGGGSGGGGSGGGGSGRNLPVATPDPGMFPCLHHSQNLLRAVSNMLQK
ARQTLEFYPCTSEEIDHEDITKDKTSTVEACLPLELTKNESCLNSRETSFITNGSCLASRKTSFMMALCLSSIYEDLK
MYQVEFKIMNAKLLMDPKRQIFLDQNMLAVIDELMQALNENSETVPOKSSLEEPDFYKTKIKLCILLHAFRIRAVT

[chemical structure]

GVEVHNAKTKPREEQYNSTYRVVSVLTVLHQDWLNGKEYKCKVSNKALPAPIEKTISKAKGQPREPQVY

[chemical structure]

GNVFSCSVMHEALHNHYTQKSLSLSPGK
SEQ ID NO: 155 (haman PD-L1 extracellular domain matant2 I54Q/E58M/R113T/M115L/S117A/G119K
extracellular domain-linker-single-chain IL-12 mutant heterodimer IL-12B (p40 E59A/F60A)-linker IL~12A
(wt p35)-hinge-IgG1 Fc mutant1; PD-L1 extracellular domain is underlined; linker is bolded and
underlined; hinge is bolded; IL-12 subunits are italicized)

[chemical structure]

[chemical structure]

EGYPKAEVIWTSSDHQVLSGKTTTTNSKREEKLENVTSTLRINTTTNEIFYCTFRRLDPEENHTAELVIPELPL
AHPPNERGGGGSGGGIWELKKDVYVVELDWYPDAPGEMVVLTCDTPEEDGITWTLDQSSEVLGSGKTLTIQVK

[chemical structure]

VKSSRGSSDPQGVTCGAATLSAERVRGDNKEYEYSVECQEDSACPAAEESLPIEVMVDAVHKLKYENYTSSFFIRDI
IKPDPPKNLOLKPLKNSRQVEVSWEYPDTWSTPHSYFSLTFCVOVOGKSKREKKDRVFTDKTSATVICRKNASISV
RAQDRYYSSSWSEWASVPCSGGGGSGGGSGGGGSRNLPVATPDPGMFPCLHHSQNLLRAVSNMLQKARQTLE
FYPCTSEEIDHEDITKDKISTVEACLPLELTKNESCLNSRETSFITNGSCLASRKTSEMMALCLSSIYEDLKMYQVEF
KTMNAKLLMDPKRQIFLDQNMLAVIDELMQALNENSETVPQKSSLEEPDFYKTKIKLCILLHAFRIRAVTIDRVMS

[chemical structure]

YVDGVEVHNAKTKPREEQYNSTYRVVSVLTVLHQDWLNGKEYKCKVSNKALPAPIEKTISKAKGQPREPQ

[chemical structure]

QQGNVFSCSVMHEALHNHYTQKSLSLSPGK
SEQ ID NO: 156 (human PD-L1 extracellular domain mutant7 I54Q/E58M/R113T/M115L/S117A
extracellular domain-linker-single-chain IL-12 mutant heterodimer IL-12B (p40 E59A/F60A)-linker IL-12A
(wt p35)-hinge-IgG1 Fc mutant1; PD-L1 extracellular domain is underlined; linker is bolded and
underlined; hinge is bolded; IL-12 subunits are italicized)

[chemical structure]

[chemical structure]

EGYPKAEVIWTSSDHQVLSGKTTTTNSKREEKLFNVTSTLRINTTTNEIFYCTFRRLDPEENHTAELVIPELPL
AHPPNERGGGGSGGGIWELKKDVYVVELDWYPDAPGEMVVLTCDTPEEDGITWTLDOSSEVLGSGKTLTIQVK

[chemical structure]

VKSSRGSSDPQGVTCGAATLSAERVRGDNKEYEYSVECQEDSACPAAEESLPIEVMVDAVHKLKYENYTSSFFIRDI
IKPDPPKNLQLKPLKNSRQVEVSWEYPDTWSTPHSYFSLTFCVQVQGKSKREKKDRVFTDKTSATVICRKNASISV
RAQDRYYSSSWSEWASVPCSGGGGSGGGSGGGGSRNLPVATPDPGMFPCLHHSQNLLRAVSNMLQKARQTLE
FYPCTSEEIDHEDITKDKTSTVEACLPLELTKNESCLNSRETSFITNGSCLASRKTSFMMALCLSSIYEDLKMYOVEF
KTMNAKLLMDPKRQIFLDQNMLAVIDELMQALNFNSETVPQKSSLEEPDFYKTKIKLCILLHAFRIRAVTIDRVMS

[chemical structure]

YVDGVEVHNAKTKPREEQYNSTYRVVSVLTVLHQDWLNGKEYKCKVSNKALPAPIEKTISKAKGQPREPQ

[chemical structure]

QQGNVFSCSVMHEALHNHYTQKSLSLSPGK
SEQ ID NO: 157 (buman PD-L1 extracellular domain mutant2 I54Q/E58M/R113T/M115L/S117A/G119K
extracellular domain-linker-hinge-lgG1 Fc mutant1-linker-single-chain IL-12 mutant heterodimer
IL~12B(p40 E59A/F60A)-linker IL-12A (wt p35); PD-L1 extracellular domain is underlined; linker is
bolded and underlined; hinge is bolded; IL-12 subunits are italicized)

[chemical structure]

[chemical structure]

EGYPKAEVIWTSSDHQVLSGKTTTTNSKREEKLFNVTSTLRINTTTNEIFYCTFRRLDPEENHTAELVIPELPL

[chemical structure]

NWYVDGVEVHNAKTKPREEQYNSTYRVVSVLTVLHQDWLNGKEYKCKVSNKALPAPIEKTISKAKGQPR

[chemical structure]

SRWQQGNVFSCSVMHEALHNHYTQKSLSLSPGKGGGGSGGGIWELKKDVYVVELDWYPDAPGEMVVLTCD

[chemical structure]

TFLRCEAKNYSGRFTCWWLTTISTDLTFSVKSSRGSSDPQGVTCGAATLSAERVRGDNKEYEYSVECQEDSACPAA
EESLPIEVMVDAVHKLKYENYTSSFFIRDIIKPDPPKNLQLKPLKNSRQVEVSWEYPDTWSTPHSYFSLTFCVOVOG
KSKREKKDRVFTDKTSATVICRKNASISVRAQDRYYSSSWSEWASVPCSGGGGSGGGSGGGGSRNLPVATPDPG
MFPCLHHSQNLLRAVSNMLQKAROTLEFYPCTSEEIDHEDITKDKTSTVEACLPLELTKNESCLNSRETSFITNGSC
LASRKTSEMMALCLSSIYEDLKMYQVEFKTMNAKLLMDPKRQIFLDQNMLAVIDELMQALNENSETVPQKSSLEE
PDFYKTKIKLCILLHAFRIRAVTIDRVMSYLNAS
SEQ ID NO: 158 (human PD-L1 extracellular domain mutant7 I54Q/E58M/R113T/M115L/S117A
extracellular domain-linker-binge-IgG1 Fc mutant1-linker-single-chain IL-12 mutant heterodimer
IL~12B(p40 E59A/F60A)-linker IL-12A (wt p35); PD-L1 extracellular domain is underlined; linker is
bolded and underlined; hinge is bolded; IL-12 subunits are italicized)

[chemical structure]

[chemical structure]

EGYPKAEVIWTSSDHQVLSGKTTTTNSKREEKLFNVTSTLRINTTTNEIFYCTERRLDPEENHTAELVIPELPL

[chemical structure]

NWYVDGVEVHNAKTKPREEQYNSTYRVVSVLTVLHQDWLNGKEYKCKVSNKALPAPIEKTISKAKGQPR

[chemical structure]

SRWQQGNVFSCSVMHEALHNHYTOKSLSLSPGKGGGGSGGGIWELKKDVYVVELDWYPDAPGEMVVLTCD

[chemical structure]

TFLRCEAKNYSGRFTCWWLTTISTDLTFSVKSSRGSSDPQGVTCGAATLSAERVRGDNKEYEYSVECOEDSACPAA
EESLPIEVMVDAVHKLKYENYTSSFFIRDIIKPDPPKNLQLKPLKNSRQVEVSWEYPDTWSTPHSYFSLTFCVOVOG
KSKREKKDRVFTDKTSATVICRKNASISVRAQDRYYSSSWSEWASVPCSGGGGSGGGSGGGGSRNLPVATPDPG
MFPCLHHSQNLLRAVSNMLOKAROTLEFYPCTSEEIDHEDITKDKTSTVEACLPLELTKNESCLNSRETSFITNGSC
LASRKTSFMMALCLSSIYEDLKMYQVEFKTMNAKLLMDPKRQIFLDQNMLAVIDELMQALNFNSETVPQKSSLEE
PDFYKTKIKLCILLHAFRIRAVTIDRVMSYLNAS
SEQ ID NO: 159 (human PD-L1 extracellular domain mutant2 I54Q/E58M/R113T/M115L/S117A/G119K
extracellular domain-linker-IL-2 mutant (L18R/Q22E/R38D/K43E/E61R)-linker-hinge-IgG1 Fc mutant2;
PD-L1 extracellular domain is underlined; linker is bolded and underlined; hinge is bolded; IL-12
subunits are italicized)

[chemical structure]

[chemical structure]

EGYPKAEVIWTSSDHQVLSGKTTTTNSKREEKLFNVTSTLRINTTTNEIFYCTFRRLDPEENHTAELVIPELPL

[chemical structure]

ELKPLEEVLNLAQSKNFHLRPRDLISNINVIVLELKGSETTFMCEYADETATIVEFLNRWITFCQSIISTLT

[chemical structure]

GVEVHNAKTKPREEQYNSTYRVVSVLTVLHQDWLNGKEYKCKVSNKALPAPIEKTISKAKGQPREPQVY

[chemical structure]

QGNVFSCSVMHEALHNHYTOKSLSLSPGK
SEQ ID NO: 160 (human PD-L1 extracellular domain mutant2 I54Q/E58M/R113T/M115L/S117A/G119K
extracellular domain-linker-IL-2 mutant (R38D/K43E/E61R/Q126T)-linker-hinge-IgG1 Fc mutant2; PD-L1
extracellular domain is underlined; linker is bolded and underlined; binge is bolded; IL-12 subunits
are italicized)

[chemical structure]

[chemical structure]

EGYPKAEVIWTSSDHOVLSGKTTTTNSKREEKLFNVTSTLRINTTTNEIFYCTFRRLDPEENHTAELVIPELPL

[chemical structure]

[chemical structure]

GVEVHNAKTKPREEQYNSTYRVVSVLTVLHQDWLNGKEYKCKVSNKALPAPIEKTISKAKGQPREPQVY

[chemical structure]

QGNVFSCSVMHEALHNHYTQKSLSLSPGK
SEQ ID NO: 161 (human PD-L1 extracellular domain mutant2 IS4Q/E58M/R113T/M115L/S117A/G119K
extracellular domain-linker-IL-2 mutant (L18R/Q22E/R38D/K43E/E61R/Q126T)-linker-hinge-IgG1 Fc
matant2; PD-L1 extracellular domain is underlined; linker is bolded and underlined; hinge is bolded;
IL-12 subunits are italicized)

[chemical structure]

[chemical structure]

EGYPKAEVIWTSSDHOVLSGKTTTTNSKREEKLFNVTSTLRINTTTNEIFYCTFRRLDPEENHTAELVIPELPL

[chemical structure]

[chemical structure]

[chemical structure]

GVEVHNAKTKPREEQYNSTYRVVSVLTVLHQDWLNGKEYKCKVSNKALPAPIEKTISKAKGQPREPQVY

[chemical structure]

QGNVFSCSVMHEALHNHYTQKSLSLSPGK
SEQ ID NO: 162 (human PD-L1 extracellular domain mutant2 I54Q/E58M/R113T/M115L/S117A/G119K
extracellular domain-linker-IL-2 mutant (L18R/Q22E/R38D/K43E/E61R/Q126T/S130R)-linker-hinge-IgG1
Fc mutant2; PD-L1 extracellular domain is underlined; linker is bolded and underlined; hinge is
bolded; IL-12 subunits are italicized)

[chemical structure]

[chemical structure]

EGYPKAEVIWTSSDHQVLSGKTTTTNSKREEKLFNVTSTLRINTTTNEIFYCTFRRLDPEENHTAELVIPELPL

[chemical structure]

[chemical structure]

[chemical structure]

[chemical structure]

VMHEALHNHYTQKSLSLSPGK
SEQ ID NO: 163 (human PD-L1 extracellular domain mutant7 I54Q/E58M/R113T/M115L/S117A/G119K
extracellular domain-linker-IL-2 mutant (L18R/Q22E/R38D/K43E/E61R)-linker-hinge-IgG1 Fc mutant2;
PD-LI extracellular domain is anderlined; linker is bolded and underlined; hinge is bolded; IL-12
subunits are italicized)

[chemical structure]

[chemical structure]

EGYPKAEVIWTSSDHQVLSGKTTTTNSKREEKLENVTSTLRINTTTNEIFYCTFRRLDPEENHTAELVIPELPL

[chemical structure]

ELKPLEEVLNLAQSKNFHLRPRDLISNINVIVLELKGSETTFMCEYADETATIVEFLNRWITFCOSIISTLT

[chemical structure]

GVEVHNAKTKPREEQYNSTYRVVSVLTVLHQDWLNGKEYKCKVSNKALPAPIEKTISKAKGQPREPQVY

[chemical structure]

QGNVFSCSVMHEALHNHYTOKSLSLSPGK
SEQ ID NO: 164 (human PD-L1 extracellular domain mutant7 I54Q/E58M/R113T/M115L/S117A
extracellular domain-linker-IL-2 mutant (R38D/K43E/E61R/Q126T)-linker-hinge-IgG1 Fc mutant2; PD-L1
extracellular domain is underlined; linker is bolded and underlined; hinge is bolded; IL-12 subunits
are italicized)

[chemical structure]

[chemical structure]

EGYPKAEVIWTSSDHQVLSGKTTTTNSKREEKLENVTSTLRINTTTNEIFYCTFRRLDPEENHTAELVIPELPL

[chemical structure]

[chemical structure]

[chemical structure]

QGNVFSCSVMHEALHNHYTQKSLSLSPGK
SEQ ID NO: 165 (human PD-L1 extracellular domain mutant7 I54Q/E58M/R113T/M115L/S117A
extracellular domain-linker-IL-2 mutant (L18R/Q22E/R38D/K43E/E61R/Q126T)-linker-hinge-IgG1 Fc
mutant2; PD-L1 extracellular domain is underlined; linker is bolded and underlined; hinge is bolded;
IL-12 subunits are italicized)

[chemical structure]

[chemical structure]

EGYPKAEVIWTSSDHQVLSGKTTTTNSKREEKLFNVTSTLRINTTTNEIFYCTERRLDPEENHTAELVIPELPL

[chemical structure]

[chemical structure]

[chemical structure]

GVEVHNAKTKPREEQYNSTYRVVSVLTVLHQDWLNGKEYKCKVSNKALPAPIEKTISKAKGQPREPQVY

[chemical structure]

QGNVFSCSVMHEALHNHYTQKSLSLSPGK
SEQ ID NO: 166 (human PD-L1 extracellular domain mutant7 I54Q/E58M/R113T/M115L/S117A
extracellular domain-linker-IL-2 mutant (L18R/Q22E/R38D/K43E/E61R/Q126T/S130R)-linker-hinge-IgG1
Fc mutant2; PD-L1 extracellular domain is underlined; linker is bolded and underlined; hinge is bolded;
IL-12 subunits are italicized)

[chemical structure]

[chemical structure]

EGYPKAEVIWTSSDHQVLSGKTTTTNSKREEKLENVTSTLRINTTTNEIFYCTFRRLDPEENHTAELVIPELPL

[chemical structure]

[chemical structure]

[chemical structure]

[chemical structure]

VMHEALHNHYTQKSLSLSPGK
SEQ ID NO: 167 (human PD-L2 extracellular domain mutant2 S58V extracellular domain-linker-single-
chain IL-12 mutant heterodimer IL~12B (p40 E59A/F60A)-linker IL-12A (wt p35)-hinge-IgG1 Fc mutant1;
PD-L2 extracellular domain is underlined; linker is bolded and underlined; hinge is bolded; IL-12
subunits are italicized)

[chemical structure]

QVRDEGQYQCIIIYGVAWDYKYLTLKVKASYRKINTHILKVPETDEVELTCQATGYPLAEVSWPNVSVPAN
TSHSRTPEGLYQVTSVLRLKPPPGRNESCVFWNTHVRELTLASIDLQSQMEPRTHPTGGGGSGGGIWELKK

[chemical structure]

LLHKKEDGIWSTDILKDQKEPKNKTFLRCEAKNYSGRFTCWWLTTISTDLTFSVKSSRGSSDPQGVTCGAATLSAE
RVRGDNKEYEYSVECQEDSACPAAEESLPIEVMVDAVHKLKYENYTSSFFIRDIIKPDPPKNLQLKPLKNSRQVEVS
WEYPDTWSTPHSYFSLTFCVQVQGKSKREKKDRVFTDKTSATVICRKNASISVRAQDRYYSSSWSEWASVPCSGGG
GSGGGSGGGGSRNLPVATPDPGMFPCLHHSQNLLRAVSNMLQKAROTLEFYPCTSEEIDHEDITKDKTSTVEA
CLPLELTKNESCLNSRETSFITNGSCLASRKTSFMMALCLSSIYEDLKMYQVEFKTMNAKLLMDPKRQIFLDQNML
AVIDELMQALNFNSETVPQKSSLEEPDFYKTKIKLCILLHAFRIRAVTIDRVMSYLNASGGGGSGGGDKTHTCPP

[chemical structure]

[chemical structure]

QKSLSLSPGK
SEQ ID NO: 168 (human PD-L2 extracellular domain mutant4 T56V/S58V/Q60L extracellular domain-
linker-single-chain IL-12 mutant heterodimer IL-12B (p40 E59A/F60A)-linker IL-12A (wt p35)-hinge-IgG1
Fc mutant1; PD-L2 extracellular domain is underlined; linker is bolded and underlined; binge is bolded;
IL-12 subunits are italicized)

[chemical structure]

VQVRDEGQYQCHIIYGVAWDYKYLTLKVKASYRKINTHILKVPETDEVELTCQATGYPLAEVSWPNVSVPA
NTSHSRTPEGLYQVTSVLRLKPPPGRNFSCVFWNTHVRELTLASIDLQSQMEPRTHPTGGGGSGGGIWELK

[chemical structure]

LLLHKKEDGIWSTDILKDQKEPKNKTFLRCEAKNYSGRFTCWWLTTISTDLTFSVKSSRGSSDPQGVTCGAATLSA
ERVRGDNKEYEYSVECQEDSACPAAEESLPIEVMVDAVHKLKYENYTSSFFIRDIIKPDPPKNLQLKPLKNSROVEV
SWEYPDTWSTPHSYFSLTFCVQVQGKSKREKKDRVFTDKTSATVICRKNASISVRAQDRYYSSSWSEWASVPCSGG
GGSGGGSGGGGSRNLPVATPDPGMFPCLHHSONLLRAVSNMLQKARQTLEFYPCTSEEIDHEDITKDKTSTVE
ACLPLELTKNESCLNSRETSFITNGSCLASRKTSFMMALCLSSIYEDLKMYQVEFKTMNAKLLMDPKRQIFLDQNM
LAVIDELMQALNFNSETVPQKSSLEEPDFYKTKIKLCILLHAFRIRAVTIDRVMSYLNASGGGGSGGGDKTHTCP

[chemical structure]

[chemical structure]

[chemical structure]

TQKSLSLSPGK
SEQ ID NO: 169 (human PD-L2 extracellular domain mutant2 S58V extracellular domain-linker-hinge-IgG1
Fc mutant1-linker-single-chain IL-12 mutant heterodimer IL-12B (p40 E59A/F60A)-linker IL-12A (wt p35);
PD-L2 extracellular domain is anderlined; linker is bolded and underlined; hinge is bolded; IL-12
subunits are italicized)

[chemical structure]

QVRDEGQYQCIIIYGVAWDYKYLTLKVKASYRKINTHILKVPETDEVELTCQATGYPLAEVSWPNVSVPAN
TSHSRTPEGLYQVTSVLRLKPPPGRNFSCVFWNTHVRELTLASIDLQSQMEPRTHPTGGGGSGGGDKTHT

[chemical structure]

[chemical structure]

[chemical structure]

HYTQKSLSLSPGKGGGGSGGGIWELKKDVYVVELDWYPDAPGEMVVLTCDTPEEDGITWTLDQSSEVLGSGK

[chemical structure]

STDLTFSVKSSRGSSDPQGVTCGAATLSAERVRGDNKEYEYSVECQEDSACPAAEESLPIEVMVDAVHKLKYENYT
SSFFIRDIIKPDPPKNLQLKPLKNSRQVEVSWEYPDTWSTPHSYFSLTFCVQVQGKSKREKKDRVFTDKTSATVICR
KNASISVRAQDRYYSSSWSEWASVPCSGGGGSGGGSGGGGSRNLPVATPDPGMFPCLHHSQNLLRAVSNMLQK
ARQTLEFYPCTSEEIDHEDITKDKTSTVEACLPLELTKNESCLNSRETSFITNGSCLASRKTSFMMALCLSSIYEDLK
MYQVEFKTMNAKLLMDPKRQIFLDQNMLAVIDELMQALNFNSETVPQKSSLEEPDFYKTKIKLCILLHAFRIRAVT
IDRVMSYLNAS
SEQ ID NO: 170 (haman PD-L2 extracellular domain matant4 T56V/S58V/Q60L extracellular domain-
linker-hinge-IgG1 Fc mutant1-linker-single-chain IL-12 mutant heterodimer IL-12B (p40 E59A/F60A)-
linker IL-12A (wt p35); PD-L2 extracellular domain is underlined; linker is bolded and underlined;
hinge is bolded; IL-12 subunits are italicized)

[chemical structure]

VQVRDEGQYQCIIYGVAWDYKYLTLKVKASYRKINTHILKVPETDEVELTCQATGYPLAEVSWPNVSVPA
NTSHSRTPEGLYQVTSVLRLKPPPGRNFSCVFWNTHVRELTLASIDLQSQMEPRTHPTGGGGSGGGDKTH

[chemical structure]

[chemical structure]

[chemical structure]

NHYTQKSLSLSPGKGGGGSGGGIWELKKDVYVVELDWYPDAPGEMVVLTCDTPEEDGITWTLDQSSEVLGSG

[chemical structure]

TISTDLTFSVKSSRGSSDPQGVTCGAATLSAERVRGDNKEYEYSVECQEDSACPAAEESLPIEVMVDAVHKLKYENY
TSSFFIRDIIKPDPPKNLQLKPLKNSRQVEVSWEYPDTWSTPHSYFSLTFCVQVQGKSKREKKDRVFTDKTSATVIC
RKNASISVRAQDRYYSSSWSEWASVPCSGGGGSGGGSGGGGSRNLPVATPDPGMFPCLHHSQNLLRAVSNMLQ
KARQTLEFYPCTSEEIDHEDITKDKTSTVEACLPLELTKNESCLNSRETSFITNGSCLASRKTSFMMALCLSSIYEDL
KMYQVEFKTMNAKLLMDPKRQIFLDQNMLAVIDELMQALNENSETVPQKSSLEEPDFYKTKIKLCILLHAFRIRA
VTIDRVMSYLNAS
SEQ ID NO: 171 (human PD-L2 extracellular domain mutant2 858V extracellular domain-linker-IL-2
matant (L18R/Q22E/R38D/K43E/E61R)-linker-hinge-IgG1 Fc mutant2; PD-L2 extracellular domain is
underlined; linker is bolded and underlined; hinge is bolded; IL-12 subunits are italicized)

[chemical structure]

QVRDEGQYQCIIIYGVAWDYKYLILKVKASYRKINTHILKVPETDEVELTCQATGYPLAEVSWPNVSVPAN
TSHSRTPEGLYQVTSVLRLKPPPGRNFSCVFWNTHVRELTLASIDLQSQMEPRTHPTGGGSGAPTSSSTKKT

[chemical structure]

[chemical structure]

SVFLFPPKPKDTLMISRTPEVTCVVVDVSHEDPEVKFNWYVDGVEVHNAKTKPREEQYNSTYRVVSVLTV

[chemical structure]

[chemical structure]

SEQ ID NO: 172 (human PD-L2 extracellular domain mutant2 S58V extracellular domain-linker-IL-2
mutant (R38D/K43E/E61R/Q126T)-linker-hinge-IgG1 Fc mutant2; PD-L2 extracellular domain is
underlined; linker is bolded and underlined; binge is bolded; IL-12 subunits are italicized)

[chemical structure]

QVRDEGQYQCIIIYGVAWDYKYLTLKVKASYRKINTHILKVPETDEVELTCQATGYPLAEVSWPNVSVPAN
TSHSRTPEGLYQVTSLRLKPPPGRNFSCVFWNTHVRELTLASIDLQSQMEPRTHPTGGGSGAPTSSSTKKTQL

[chemical structure]

[chemical structure]

FLFPPKPKDTLMISRTPEVTCVVVDVSHEDPEVKFNWYVDGVEVHNAKIKPREEQYNSTYRVVSVLTVLH

[chemical structure]

[chemical structure]

SEQ ID NO: 173 (human PD-L2 extracellular domain mutant2 858V extracellular domain-linker-IL-2
mutant (L18R/Q22E/R38D/K43E/E61R/Q126T)-linker-hinge-IgG1 Fc mutant2; PD-L2 extracellular domain
is underlined; linker is bolded and underlined; hinge is bolded; IL-12 subunits are italicized)

[chemical structure]

QVRDEGQYQCIIIYGVAWDYKYLTLKVKASYRKINTHILKVPETDEVELTCQATGYPLAEVSWPNVSVPAN
TSHSRTPEGLYQVTSLRLKPPPGRNFSCVFWNTHVRELTLASIDLQSQMEPRTHPTGGGSGAPTSSSTKKTQL

[chemical structure]

[chemical structure]

FLFPPKPKDTLMISRTPEVTCVVVDVSHEDPEVKFNWYVDGVEVHNAKTKPREEQYNSTYRVVSVLTVLH

[chemical structure]

[chemical structure]

SEQ ID NO: 174 (human PD-L2 extracellular domain mutant2 S58V extracellular domain-linker-IL-2
mutant (R38D/K43E/E61R)(L18R/Q22E/Q126T/S130R)-linker-binge-IgG1 Fc mutant2; PD-L2 extracellular
domain is underlined; linker is bolded and underlined; hinge is bolded; IL-12 subunits are italicized)

[chemical structure]

QVRDEGQYQCIIIYGVAWDYKYLTLKVKASYRKINTHILKVPETDEVELTCQATGYPLAEVSWPNVSVPAN
TSHSRTPEGLYQVTSLRLKPPPGRNESCVFWNTHVRELTLASIDLQSQMEPRTHPTGGGSGAPTSSSTKKTQL

[chemical structure]

[chemical structure]

FLFPPKPKDTLMISRTPEVTCVVVDVSHEDPEVKFNWYVDGVEVHNAKTKPREEQYNSTYRVVSVLTVLH

[chemical structure]

[chemical structure]

SEQ ID NO: 175 (human PD-L2 extracellular domain mutant4 T56V/S58V/Q60L extracellular domain-
linker-IL-2 mutant (L18R/Q22E/R38D/K43E/E61R)-linker-hinge-IgG1 Fc mutant2; PD-L2 extracellular
domain is underlined; linker is bolded and underlined; hinge is bolded; IL-12 subunits are italicized)

[chemical structure]

VQVRDEGQYQCIIIYGVAWDYKYLTLKVKASYRKINTHILKVPETDEVELTCQATGYPLAEVSWPNVSVPA
NTSHSRTPEGLYQVTSVLRLKPPPGRNFSCVFWNTHVRELTLASIDLQSQMEPRTHPTGGGSGAPTSSSTKK

[chemical structure]

[chemical structure]

PSVFLFPPKPKDTLMISRTPEVTCVVVDVSHEDPEVKFNWYVDGVEVHNAKTKPREEQYNSTYR VVSVLT

[chemical structure]

[chemical structure]

SEQ ID NO: 176 (human PD-L2 extracellular domain mutant4 T56V/S58V/Q60L extracellular domain-
linker-IL-2 mutant (R38D/K43E/E61R/Q126T)-linker-hinge-IgG1 Fc mutant2; PD-L2 extracellular domain
is underlined; linker is bolded and underlined; hinge is bolded; IL-12 subunits are italicized)

[chemical structure]

VQVRDEGOYQCIIIYGVAWDYKYLTLKVKASYRKINTHILKVPETDEVELTCQATGYPLAEVSWPNVSVPA
NTSHSRTPEGLYQVTSVLRLKPPPGRNFSCVFWNTHVRELTLASIDLQSQMEPRTHPTGGGSGAPTSSSTKK

[chemical structure]

PSVFLFPPKPKDTLMISRTPEVTCVVVDVSHEDPEVKFNWYVDGVEVHNAKTKPREEQYNSTYRVVSVLT

[chemical structure]

[chemical structure]

SEQ ID NO: 177 (human PD-L2 mutant4 T56V/S58V/Q60L extracellular domain-linker-IL-2 mutant
(L18R/Q22E/R38D/K43E/E61R/Q126T)-linker-hinge-IgG1 Fc mutant2; PD-L2 extracellular domain is
underlined; linker is bolded and underlined; binge is bolded; IL-12 subanits are italicized)

[chemical structure]

VQVRDEGQYQCIIYGVAWDYKYLTLKVKASYRKINTHILKVPETDEVELTCQATGYPLAEVSWPNVSVPA
NTSHSRTPEGLYQVTSVLRLKPPPGRNFSCVFWNTHVRELTLASIDLQSQMEPRTHPTGGGSGAPTSSSTKK

[chemical structure]

[chemical structure]

PSVFLFPPKPKDTLMISRTPEVTCVVVDVSHEDPEVKFNWYVDGVEVHNAKTKPREEQYNSTYRVVSVLT

[chemical structure]

[chemical structure]

SEQ ID NO: 178 (human PD-L2 mutant4 T56V/S58V/Q60L extracellular domain-linker-IL-2 mutant
(L18R/Q22E/R38D/K43E/E61R/Q126T/S130R)-linker-hinge-IgG1 Fc mutant2; PD-L2 extracellular domain
is underlined; linker is bolded and underlined; hinge is bolded; IL-12 subunits are italicized)

[chemical structure]

VQVRDEGQYQCIIIYGVAWDYKYLTLKVKASYRKINTHILKVPETDEVELTCQATGYPLAEVSWPNVSVPA
NTSHSRTPEGLYQVTSVLRLKPPPGRNFSCVFWNTHVRELTLASIDLQSQMEPRTHPTGGGSGAPTSSSTKK

[chemical structure]

[chemical structure]

GPSVFLFPPKPKDTLMISRTPEVTCVVVDVSHEDPEVKFNWYVDGVEVHNAKTKPREEQYNSTYRVVSVL

[chemical structure]

[chemical structure]

K
SEQ ID NO: 179 (human PD-L1 matant2 I54Q/E58M/R113T/M115L/S117A/G119K extracellular domain-
linker-IL-2 mutant (R38D/K43E/E61R) linker-hinge-IgG1 Fe mutant2; PD-L1 extracellular domain is
underlined; linker is bolded and underlined; hinge is bolded; IL-12 subunits are italicized)

[chemical structure]

[chemical structure]

EGYPKAEVIWTSSDHQVLSGKTTTTNSKREEKLFNVTSTLRINTTTNEIFYCTFRRLDPEENHTAELVIPELPL

[chemical structure]

LKPLEEVLNLAQSKNFHLRPRDLISNINVIVLELKGSETTFMCEYADETATIVEFLNRWITFCQSIISTLT

[chemical structure]

GVEVHNAKTKPREEQYNSTYRVVSVLTVLHQDWLNGKEYKCKVSNKALPAPIEKTISKAKGQPREPQVY

[chemical structure]

QGNVFSCSVMHEALHNHYTQKSLSLSPGK
SEQ ID NO: 180 (human PD-L1 extracellular domain mutant2 I54Q/E58M/R113T/M115L/S117A/G119K
extracellular domain-linker-single-chain mouse IL-12 mutant heterodimer IL-12B (p40 E59A/F60A)-linker
IL~12A (wt p35)-hinge-IgG1 Fc mutant1; PD-L1 extracellular domain is underlined; linker is bolded and
underlined; hinge is bolded; mouse IL-12 subunits are italicized)

[chemical structure]

[chemical structure]

EGYPKAEVIWTSSDHQVLSGKTTTTNSKREEKLFNVTSTLRINTTTNEIFYCTFRRLDPEENHTAELVIPELPL
AHPPNERGGGGSGGGMWELEKDVYVVEVDWTPDAPGETVNLTCDTPEEDDITWTSDQRHGVIGSGKTLTTIV

[chemical structure]

KSSSSSPDSRAVTCGMASLSAEKVTLDQRDYEKYSVSCQEDVTCPTAEETLPIELALEARQQNKYENYSTSFFIRDII
KPDPPKNLQMKPLKNSQVEVSWEYPDSWSTPHSYFSLKFFVRIQRKKEKMKETEEGCNQKGAFLVEKTSTEVQC
KGGNVCVQAQDRYYNSSCSKWACVPCRVRSGGPGGGGSGGGSGGGGSGRVIPVSGPARCLSQSRNLLKTTDD
MVKTAREKLKHYSCTAEDIDHEDITRDQTSTLKTCLPLELHKNESCLATRETSSTTRGSCLPPQKTSLMMTLCLGSI
YEDLKMYQTEFQAINAALQNHNHQQIILDKGMLVAIDELMQSLNHNGETLROKPPVGEADPYRVKMKLCILLHA

[chemical structure]

VSHEDPEVKFNWYVDGVEVHNAKTKPREEQYNSTYRVVSVLTVLHQDWLNGKEYKCKVSNKALPAPIEK

[chemical structure]

[chemical structure]

SEQ ID NO: 181 (human PD-L1 extracellular domain mutant2 I54Q/E58M/R113T/M115L/S117A/G119K
extracellular domain-linker-hinge-IgG1 Fc mutant1- linker-single-chain mouse IL-12 mutant heterodimer
IL-12B (p40 E59A/F60A)-linker IL-12A (wt p35); PD-L1 extracellular domain is underlined; linker is
bolded and underlined; hinge is bolded; mouse IL-12 subunits are italicized)

[chemical structure]

[chemical structure]

EGYPKAEVIWTSSDHQVLSGKTTTTNSKREEKLFNVTSTLRINTTTNEIFYCTFRRLDPEENHTAELVIPELPL

[chemical structure]

NWYVDGVEVHNAKTKPREEQYNSTYRVVSVLTVLHQDWLNGKEYKCKVSNKALPAPIEKTISKAKGQPR

[chemical structure]

SRWQQGNVFSCSVMHEALHNHYTQKSLSLSPGKGGGGSGGGMWELEKDVYVVEVDWTPDAPGETVNLTC

[chemical structure]

KCEAPNYSGRFTCSWLVQRNMDLKFNIKSSSSSPDSRAVTCGMASLSAEKVTLDQRDYEKYSVSCOEDVTCPTAEE
TLPIELALEARQQNKYENYSTSFFIRDIIKPDPPKNLQMKPLKNSQVEVSWEYPDSWSTPHSYFSLKFFVRIORKKE
KMKETEEGCNQKGAFLVEKTSTEVQCKGGNVCVQAQDRYYNSSCSKWACVPCRVRSGGPGGGGSGGGSGGG
GSGRVIPVSGPARCLSOSRNLLKTTDDMVKTAREKLKHYSCTAEDIDHEDITRDQTSTLKTCLPLELHKNESCLAT
RETSSTTRGSCLPPQKTSLMMTLCLGSIYEDLKMYQTEFQAINAALQNHNHQQIILDKGMLVAIDELMQSLNHNG
ETLRQKPPVGEADPYRVKMKLCILLHAFSTRVVTINRVMGYLSSA
SEQ ID NO: 182 (human PD-L1 extracellular domain mutant2 I54Q/E58M/R113T/M115L/S117A/G119K
extracellular domain-linker-single-chain mutant homodimer IFN-γ (A23V/A23V)-linker hinge-IgG1 Fc
mutant1; PD-L1 extracellular domain is underlined; linker is bolded and underlined; hinge is bolded;
IFN-γ is italicized)

[chemical structure]

[chemical structure]

EGYPKAEVIWTSSDHOVLSGKTTTTNSKREEKLENVTSTLRINTTTNEIFYCTFRRLDPEENHTAELVIPELPL

[chemical structure]

NFKDDQSIQKSVETIKEDMNVKFFNSNKKKRDDFEKLTNYSVTDLNVQRKAIHELIQVMAELSPAAKTGKRKRSQ

[chemical structure]

SQIVSFYFKLEKNEKDDQSIQKSVETIKEDMNVKFFNSNKKKRDDFEKLTNYSVTDLNVQRKAIHELIQVMAELSP

[chemical structure]

SHEDPEVKFNWYVDGVEVHNAKTKPREEQYNSTYRVVSVLTVLHQDWLNGKEYKCKVSNKALPAPIEKT

[chemical structure]

SEQ ID NO: 183 (human PD-L1 extracellular domain mutant7 I54Q/E58M/R113T/M115L/S117A
extracellular domain-linker- single-chain mutant homodimer IFN-γ (A23V/A23V)-linker hinge-IgGI Fe
mutant1; PD-L1 extracellular domain is underlined; linker is bolded and underlined; hinge is bolded;
IFN-γ is italicized)

[chemical structure]

[chemical structure]

EGYPKAEVIWTSSDHQVLSGKTTTTNSKREEKLFNVTSTLRINTTTNEIFYCTFRRLDPEENHTAELVIPELPL

[chemical structure]

NFKDDQSIQKSVETIKEDMNVKFFNSKKKRDDFEKLTNYSVTDLNVQRKAIHELIQVMAELSPAAKTGKRKRSQ

[chemical structure]

SQIVSFYFKLFKNFKDDQSIQKSVETIKEDMNVKFFNSNKKKRDDFEKLTNYSVTDLNVQRKAIHELIOVMAELSP

[chemical structure]

SHEDPEVKFNWYVDGVEVHNAKTKPREEQYNSTYRVVSVLTVLHQDWLNGKEYKCKVSNKALPAPIEKT

[chemical structure]

[chemical structure]

SEQ ID NO: 184 (human PD-L1 extracellular domain mutant2 I54Q/E58M/R113T/M115L/S117A/G119K
extracellular domain-linker-single-chain mutant homodimer IFN-γ (A23V/A23V)-linker-hinge-IgG1 Fc
mutant2; PD-L1 is extracellular domain underlined; linker is shaded; hinge is bolded; IFN-γ is
italicized)

[chemical structure]

[chemical structure]

EGYPKAEVIWTSSDHQVLSGKTTTTNSKREEKLFNVTSTLRINTTTNEIFYCTERRLDPEENHTAELVIPELPL

[chemical structure]

DDQSIQKSVETIKEDMNVKFFNSNKKKRDDFEKLINYSVTDLNVQRKAIHELIQVMAELSPAAKTGKRKRSQMLF

[chemical structure]

SFYFKLFKNFKDDQSIQKSVETIKEDMNVKFFNSNKKKRDDFEKLINYSVTDLNVQRKAIHELIQVMAELSPAAKT

[chemical structure]

DPEVKFNWYVDGVEVHNAKTKPREEQYNSTYRVVSVLTVLHQDWLNGKEYKCKVSNKALPAPIEKTISK

[chemical structure]

KLTVDKSRWQQGNVFSCSVMHEALHNHYTQKSLSLSPGK
SEQ ID NO: 185 (human PD-L1 extracellular domain mutant7 I54Q/E58M/R113T/M115L/S117A/G119K
extracellular domain-linker-single-chain mutant homodimer IFN-γ (A23V/A23V)-linker-hinge-IgG1 Fc
mutant2; PD-L1 extracellular domain is underlined; linker is bolded and underlined; hinge is bolded;
IFN-γ is italicized)

[chemical structure]

[chemical structure]

EGYPKAEVIWTSSDHQVLSGKTTTTNSKREEKLFNVTSTLRINTTTNEIFYCTFRRLDPEENHTAELVIPELPL

[chemical structure]

DDQSIQKSVETIKEDMNVKFFNSNKKKRDDFEKLTNYSVTDLNVQRKAIHELIQVMAELSPAAKTGKRKRSQMLF

[chemical structure]

SFYFKLFKNFKDDOSIQKSVETIKEDMNVKFFNSNKKKRDDFEKLTNYSVTDLNVQRKAIHELIQVMAELSPAAKT

[chemical structure]

DPEVKFNWYVDGVEVHNAKTKPREEQYNSTYRVVSVLTVLHQDWLNGKEYKCKVSNKALPAPIEKTISK

[chemical structure]

KLTVDKSRWQQGNVFSCSVMHEALHNHYTQKSLSLSPGK
SEQ ID NO: 186 (human PD-L2 extracellular domain mutant2 S58V extracellular domain-linker-single-
chain mutant homodimer IFN-γ (A23V/A23V)-linker-hinge-IgG1 Fc mutant1; PD-L2 extracellular domain is
underlined; linker is bolded and underlined; hinge is bolded; IFN-γ is italicized)

[chemical structure]

QVRDEGOYOCIIIYGVAWDYKYLTLKVKASYRKINTHILKVPETDEVELTCQATGYPLAEVSWPNVSVPAN
TSHSRTPEGLYQVTSVLRLKPPPGRNFSCVFWNTHVRELTLASIDLQSQMEPRTHPTGGGGSGGGQDPYVK

[chemical structure]

FNSNKKKRDDFEKLTNYSVTDLNVORKAIHELIQVMAELSPAAKTGKRKRSQMLFRGGGGGGGGSGGGGSG

[chemical structure]

ETIKEDMNVKFFNSNKKKRDDFEKLINYSVTDLNVQRKAIHELIQVMAELSPAAKTGKRKRSOMLFRGGGGGSG

[chemical structure]

[chemical structure]

VMHEALHNHYTQKSLSLSPGK
SEQ ID NO: 187 (human PD-L2 extracellular domain mutant4 T56V/S58V/Q60L extracellular domain-
linker- single-chain mutant homodimer IFN-γ (A23V/A23V)-linker-hinge-IgG1 Fc mutant1; PD-L2
extracellular domain is underlined; linker is bolded and underlined; hinge is bolded; IFN-γ is
italicized)

[chemical structure]

VQVRDEGQYQCIIIYGVAWDYKYLTLKVKASYRKINTHILKVPETDEVELTQOATGYPLAEVSWPNVSVPA
NTSHSRTPEGLYQVTSVLRLKPPPGRNFSCVFWNTHVRELTLASIDLOSOMEPRTHPTGGGGSGGGQDPYV

[chemical structure]

FFNSNKKKRDDFEKLTNYSVTDLNVQRKAIHELIQVMAELSPAAKTGKRKRSQMLFRGGGGSGGGGSGGGGS

[chemical structure]

VETIKEDMNVKFFNSNKKKRDDFEKLINYSVTDLNVORKAIHELIQVMAELSPAAKTGKRKRSQMLFRGGGGGS

[chemical structure]

[chemical structure]

[chemical structure]

VMHEALHNHYTQKSLSLSPGK
SEQ ID NO: 188 (human PD-L2 extracellular domain mutant2 858V extracellular domain-linker-single-
chain mutant homodimer IFN-γ (A23V/A23V)-linker-hinge-IgG1 Fc mutant2; PD-L2 extracellular domain is
underlined; linker is bolded and underlined; hinge is bolded; IFN-γ is italicized)

[chemical structure]

QVRDEGQYQCIIIYGVAWDYKYLTLKVKASYRKINTHILKVPETDEVELTCQATGYPLAEVSWPNVSVPAN
TSHSRTPEGLYOVTSVLRLKPPPGRNFSCVFWNTHVRELTLASIDLQSQMEPRTHPTGGGSGQDPYVKEAEN

[chemical structure]

KKKRDDFEKLTNYSVTDLNVQRKAIHELIQVMAELSPAAKTGKRKRSQMLFRGGGGGGGGSGGGGSGGGG

[chemical structure]

EDMNVKFFNSNKKKRDDFEKLTNYSVTDLNVQRKAIHELIQVMAELSPAAKTGKRKRSQMLFRGGGGGSGGG

[chemical structure]

[chemical structure]

[chemical structure]

HEALHNHYTQKSLSLSPGK
SEQ ID NO: 189 (human PD-L2 extracellular domain mutant4 T56V/S58V/Q60L extracellular domain-
linker-single-chain mutant homodimer IFN-γ (A23V/A23V)-linker-hinge-IgG1 Fc mutant2; PD-L2
extracellular domain is underlined; linker is bolded and underlined; hinge is bolded; IFN-γ is
italicized)

[chemical structure]

VQVRDEGOYQCIIIYGVAWDYKYLTLKVKASYRKINTHILKVPETDEVELTCQATGYPLAEVSWPNVSVPA
NTSHSRTPEGLYOVTSVLRLKPPPGRNFSCVFWNTHVRELTLASIDLQSOMEPRTHPTGGGSGQDPYVKEA

[chemical structure]

SNKKKRDDFEKLINYSVTDLNVQRKAIHELIQVMAELSPAAKTGKRKRSOMLERGGGGSGGGGSGGGGSGGG

[chemical structure]

KEDMNVKFFNSNKKKRDDFEKLTNYSVTDLNVORKAIHELIQVMAELSPAAKTGKRKRSQMLFRGGGGGSGG

[chemical structure]

[chemical structure]

[chemical structure]

MHEALHNHYTOKSLSLSPGK
SEQ ID NO: 190 (human CD155 extracellular domain-linker-single-chain IL-12 mutant heterodimer IL-12B
(p40 E59A/F60A)-linker IL-12A (wt p35)-hinge-IgG1 Fc mutant1; CD155 extracellular domain is underlined;
linker is bolded and underlined; hinge is bolded; IL-12 subunits are italicized)
WPPPGTGDVVVQAPTQVPGFLGDSVTLPCYLQVPNMEVTHVSQLTWARHGESGSMAVFHOTQGPSYSES
KRLEFVAARLGAELRNASLRMFGLRVEDEGNYTCLFVTFPQGSRSVDIWLRVLAKPQNTAEVQKVQLTGE
PVPMARCVSTGGRPPAQITWHSDLGGMPNTSQVPGFLSGTVTVTSLWILVPSSQVDGKNVTCKVEHESFEK
PQLLTVNLTVYYPPEVSISGYDNNWYLGQNEATLTCDARSNPEPTGYNWSTTMGPLPPFAVAQGAQLLIRP
VDKPINTTLICNVTNALGARQAELTVQVKEGPPSEHSGISRNGGGGSGGGIWELKKDVYVVELDWYPDAPG

[chemical structure]

DQKEPKNKTFLRCEAKNYSGRFTCWWLTTISTDLTFSVKSSRGSSDPQGVTCGAATLSAERVRGDNKEYEYSVEC
QEDSACPAAEESLPIEVMVDAVHKLKYENYTSSFFIRDIIKPDPPKNLQLKPLKNSRQVEVSWEYPDTWSTPHSYES
LTFCVQVQGKSKREKKDRVFTDKTSATVICRKNASISVRAQDRYYSSSWSEWASVPCSGGGGSGGGSGGGGSRN
LPVATPDPGMFPCLHHSONLLRAVSNMLOKAROTLEFYPCTSEEIDHEDITKDKTSTVEACLPLELTKNESCLNSR
ETSFITNGSCLASRKTSFMMALCLSSIYEDLKMYOVEFKTMNAKLLMDPKRQIFLDQNMLAVIDELMQALNENSE

[chemical structure]

FPPKPKDTLMISRTPEVTCVVVDVSHEDPEVKFNWYVDGVEVHNAKTKPREEQYNSTYRVVSVLTVLHQD

[chemical structure]

[chemical structure]

SEQ ID NO: 191 (human CD155 extracellular domain-linker-hinge-IgG1 Fc mutant1-linker-single-chain IL-
12 mutant heterodimer IL-12B (p40 E59A/F60A)-linker IL-12A (wt p35); CD155 extracellular domain is
underlined; linker is bolded and underlined; hinge is bolded; IL-12 subunits are italicized)
WPPPGTGDVVVQAPTQVPGFLGDSVTLPCYLQVPNMEVTHVSQLTWARHGESGSMAVFHQTQGPSYSES
KRLEFVAARLGAELRNASLRMFGLRVEDEGNYTCLFVTFPQGSRSVDIWLRVLAKPQNTAEVQKVQLTGE
PVPMARCVSTGGRPPAQITWHSDLGGMPNTSQVPGFLSGTVTVTSLWILVPSSQVDGKNVTCKVEHESFEK
PQLLTVNLTVYYPPEVSISGYDNNWYLGONEATLTCDARSNPEPTGYNWSTTMGPLPPFAVAQGAQLLIRP

[chemical structure]

FLFPPKPKDTLMISRTPEVTCVVVDVSHEDPEVKFNWYVDGVEVHNAKTKPREEQYNSTYRVVSVLTVLH

[chemical structure]

[chemical structure]

[chemical structure]

CHKGGEVLSHSLLLLHKKEDGIWSTDILKDQKEPKNKTFLRCEAKNYSGRFTCWWLTTISTDLTFSVKSSRGSSDP
QGVTCGAATLSAERVRGDNKEYEYSVECOEDSACPAAEESLPIEVMVDAVHKLKYENYTSSFFIRDIIKPDPPKNL
QLKPLKNSRQVEVSWEYPDTWSTPHSYFSLTFCVQVQGKSKREKKDRVFTDKTSATVICRKNASISVRAQDRYYSSS
WSEWASVPCSGGGGSGGGSGGGGSRNLPVATPDPGMFPCLHHSONLLRAVSNMLQKARQTLEFYPCTSEEID
HEDITKDKTSTVEACLPLELTKNESCLNSRETSFITNGSCLASRKTSFMMALCLSSIYEDLKMYQVEFKTMNAKLLM
DPKRQIFLDQNMLAVIDELMQALNFNSETVPQKSSLEEPDFYKTKIKLCILLHAFRIRAVTIDRVMSYLNAS
SEQ ID NO: 192 (human CD155 extracellular domain-linker-single-chain mutant homodimer IFN-γ
(A23V/A23V)-linker hinge-IgG1 Fc mutant1; CD155 extracellular domain is underlined; linker is bolded
and underlined; hinge is bolded; IFN-γ is italicized)
WPPPGTGDVVVQAPTQVPGFLGDSVTLPCYLQVPNMEVTHVSQLTWARHGESGSMAVFHQTQGPSYSES
KRLEFVAARLGAELRNASLRMFGLRVEDEGNYTCLFVTFPQGSRSVDIWLRVLAKPQNTAEVQKVQLTGE
PVPMARCVSTGGRPPAQITWHSDLGGMPNTSQVPGFLSGTVTVTSLWILVPSSQVDGKNVTCKVEHESFEK
PQLLTVNLTVYYPPEVSISGYDNNWYLGQNEATLTCDARSNPEPTGYNWSTTMGPLPPFAVAQGAQLLIRP
VDKPINTTLICNVTNALGARQAELTVQVKEGPPSEHSGISRNGGGGSGGGQDPYVKEAENLKKYFNAGHSD

[chemical structure]

NYSVTDLNVQRKAIHELIQVMAELSPAAKTGKRKRSQMLFRGGGGSGGGGSGGGGSGGGGSQDPYVKEAENL

[chemical structure]

KKRDDFEKLTNYSVTDLNVQRKAIHELIQVMAELSPAAKTGKRKRSQMLFRGGGGGSGGGDKTHTCPPCPAP

[chemical structure]

[chemical structure]

SLSPGK
SEQ ID NO: 193 (human CD155 extracellular domain-linker-single-chain mutant homodimer IFN-γ
(A23V/A23V)-linker-hinge-IgG1 Fc mutant2; CD155 extracellular domain is underlined; linker is bolded
and underlined; hinge is bolded; IFN-γ is italicized)
WPPPGTGDVVVQAPTQVPGFLGDSVTLPCYLQVPNMEVTHVSQLTWARHGESGSMAVFHQTQGPSYSES
KRLEFVAARLGAELRNASLRMFGLRVEDEGNYTCLFVTFPQGSRSVDIWLRVLAKPQNTAEVQKVQLTGE
PVPMARCVSTGGRPPAQITWHSDLGGMPNTSQVPGELSGTVTVTSLWILVPSSQVDGKNVTCKVEHESFEK
PQLLTVNLTVYYPPEVSISGYDNNWYLGQNEATLTCDARSNPEPTGYNWSTTMGPLPPFAVAQGAQLLIRP

[chemical structure]

GTLFLGILKNWKEESDRKIMQSQIVSFYFKILFKNFKDDQSIQKSVETIKEDMNVKFFNSNKKKRDDFEKLTNYSVT
DLNVQRKAIHELIQVMAELSPAAKTGKRKRSQMLFRGGGGSGGGGSGGGGSGGGGSQDPYVKEAENLKKYF

[chemical structure]

[chemical structure]

GGPSVFLFPPKPKDTLMISRTPEVTCVVVDVSHEDPEVKFNWYVDGVEVHNAKTKPREEQYNSTYRVVSV

[chemical structure]

[chemical structure]

PGK
SEQ ID NO: 194 (linker; n is an integer of at least 1)
(G)ₙ
SEQ ID NO: 195 (linker; n is an integer of at least 1)
(GS)ₙ
SEQ ID NO: 196 (linker; n is an integer of at least 1)
(GGS)ₙ
SEQ ID NO: 197 (linker; n is an integer of at least 1)
(GGGS)ₙ
SEQ ID NO: 198 (linker; n is an integer of at least 1)
(GGS)ₙ(GGGS)ₙ
SEQ ID NO: 199 (linker; n is an integer of at least 1)
(GSGGS)ₙ
SEQ ID NO: 200 (linker; n is an integer of at least 1)
(GGSGS)ₙ
SEQ ID NO: 201 (linker; n is an integer of at least 1)
(GGGGS)n
SEQ ID NO: 202 (linker)
GG
SEQ ID NO: 203 (linker)
GSG
SEQ ID NO: 204 (linker)
GGSG
SEQ ID NO: 205 (linker)
GGSGG
SEQ ID NO: 206 (linker)
GSGGGGG
SEQ ID NO: 207 (linker)
GSGSG
SEQ ID NO: 208 (linker)
GSGGG
SEQ ID NO: 209 (linker)
GGGSG
SEQ ID NO: 210 (linker)
GSSSG
SEQ ID NO: 211 (linker)
GGSGGS
SEQ ID NO: 212 (linker)
SGGGGS
SEQ ID NO: 213 (linker)
GGGGS
SEQ ID NO: 214 (linker; n is an integer of at least 1)
(GA)ₙ
SEQ ID NO: 215 (linker)
GRAGGGGAGGGG
SEQ ID NO: 216 (linker)
GRAGGG
SEQ ID NO: 217 (linker)
GSGGGSGGGGSGGGGS
SEQ ID NO: 218 (linker)
GGGSGGGGSGGGGS
SEQ ID NO: 219 (linker)
GGGSGGSGGS
SEQ ID NO: 220 (linker)
GGSGGSGGSGGSGGG
SEQ ID NO: 221 (linker)
GGSGGSGGGGSGGGGS
SEQ ID NO: 222 (linker)
GGSGGSGGSGGSGGSGGS
SEQ ID NO: 223 (linker)
GGGGGGSGGGGSGGGGSA
SEQ ID NO: 224 (linker)
GSGGGSGGGGGGGGSGGGGS
SEQ ID NO: 225 (linker)
KTGGGSGGGS
SEQ ID NO: 226 (linker)
GGPGGGGSGGGSGGGGS
SEQ ID NO: 227 (linker)
GGGSGGGGSGGGGSGGGGS
SEQ ID NO: 228 (linker)
GGGGSGGGGSGGGGSGGGGSG
SEQ ID NO: 229 (linker)
GGGGSGGGGSGGGGS
SEQ ID NO: 230 (linker)
ASTKGP
SEQ ID NO: 231 (linker)
DKP
SEQ ID NO: 232 (linker)
DKPGS
SEQ ID NO: 233 (linker)
PGS
SEQ ID NO: 234 (linker)
GS
SEQ ID NO: 235 (linker)
DKPGSG
SEQ ID NO: 236 (linker)
PGSG
SEQ ID NO: 237 (linker)
DKPGSGS
SEQ ID NO: 238 (linker)
PGSGS
SEQ ID NO: 239 (linker)
GSGS
SEQ ID NO: 240 (linker)
DKPGSGGGGG
SEQ ID NO: 241 (linker)
PGSGGGGG
SEQ ID NO: 242 (linker)
P
SEQ ID NO: 243
GGGGSGGGSGGGG
SEQ ID NO: 244
GGGGSGGG
SEQ ID NO: 245
GGPGGGGSGGGSGGGG
SEQ ID NO: 246
GGGGSGGGSGGGGS
SEQ ID NO: 247 (human CD155 extracellular domain-linker- IL-2 mutant (L18R/Q22E/R38D/K43E/E61R)-
linker-hinge-IgG1 Fc mutant2; CD155 extracellular domain is underlined; linker is bolded and
underlined; hinge is bolded; IL-12 subunits are italicized)
WPPPGTGDVVVOAPTQVPGELGDSVTLPCYLQVPNMEVTHVSQLTWARHGESGSMAVFHQTQGPSYSES
KRLEFVAARLGAELRNASLRMFGLRVEDEGNYTCLFVTFPQGSRSVDIWLRVLAKPQNTAEVQKVQLTGE
PVPMARCVSTGGRPPAQITWHSDLGGMPNTSQVPGELSGTVTVTSLWILVPSSQVDGKNVTCKVEHESFEK
PQLLTVNLTVYYPPEVSISGYDNNWYLGQNEATLTCDARSNPEPTGYNWSTTMGPLPPFAVAQGAQLLIRP

[chemical structure]

[chemical structure]

[chemical structure]

RTPEVTCVVVDVSHEDPEVKFNWYVDGVEVHNAKTKPREEQYNSTYRVVSVLTVLHQDWLNGKEYKCK

[chemical structure]

[chemical structure]

SEQ ID NO: 248 (buman CD155 extracellular domain-linker-IL-2 mutant (R38D/K43E/E61R/Q126T)-
linker-hinge-IgG1 Fc mutant2; CD155 extracellular domain is underlined; linker is bolded and
underlined; hinge is bolded; IL-12 subunits are italicized)
WPPPGTGDVVVQAPTQVPGFLGDSVTLPCYLQVPNMEVTHVSOLTWARHGESGSMAVFHQTQGPSYSES
KRLEFVAARLGAELRNASLRMFGLRVEDEGNYTCLFVTFPOGSRSVDIWLRVLAKPQNTAEVQKVQLTGE
PVPMARCVSTGGRPPAQITWHSDLGGMPNTSOVPGFLSGTVTVTSLWILVPSSQVDGKNVTCKVEHESFEK
PQLLTVNLTVYYPPEVSISGYDNNWYLGONEATLTCDARSNPEPTGYNWSTTMGPLPPFAVAQGAQLLIRP
VDKPINTTLICNVTNALGARQAELTVQVKEGPPSEHSGISRNGGGSGAPTSSSTKKTQLQLEHLLLDLQMILN

[chemical structure]

[chemical structure]

RTPEVTCVVVDVSHEDPEVKFNWYVDGVEVHNAKTKPREEQYNSTYRVVSVLTVLHQDWLNGKEYKCK

[chemical structure]

[chemical structure]

SEQ ID NO: 249 (human CD155 extracellular domain-linker-IL-2 mutant
(L18R/Q22E/R38D/K43E/E61R/Q126T)-linker-hinge-IgG1 Fe mutant2; CD 155 extracellular domain is
underlined; linker is bolded and underlined; hinge is bolded; IL-12 subunits are italicized)
WPPPGTGDVVVQAPTOVPGFLGDSVTLPCYLQVPNMEVTHVSQLTWARHGESGSMAVFHQTQGPSYSES
KRLEFVAARLGAELRNASLRMFGLRVEDEGNYTCLFVTFPQGSRSVDIWLRVLAKPQNTAEVQKVQLTGE
PVPMARCVSTGGRPPAQITWHSDLGGMPNTSQVPGFLSGTVTVTSLWILVPSSQVDGKNVTCKVEHESFEK
PQLLTVNLTVYYPPEVSISGYDNNWYLGQNEATLTCDARSNPEPTGYNWSTTMGPLPPFAVAQGAQLLIRP

[chemical structure]

[chemical structure]

[chemical structure]

RTPEVTCVVVDVSHEDPEVKFNWYVDGVEVHNAKTKPREEQYNSTYRVVSVLTVLHQDWLNGKEYKCK

[chemical structure]

[chemical structure]

SEQ ID NO: 250 (haman CD155 extracellular domain-linker-IL-2 mutant
(L18R/Q22E/R38D/K43E/E61RQ126T/S130R)-linker-hinge-IgG1 Fe mutant2; CD155 extracellular domain is
underlined; linker is bolded and underlined; hinge is bolded; IL-12 subunits are italicized)
WPPPGTGDVVVQAPTQVPGFLGDSVILPCYLQVPNMEVTHVSQLTWARHGESGSMAVFHQTQGPSYSES
KRLEFVAARLGAELRNASLRMFGLRVEDEGNYTCLFVTFPOGSRSVDIWLRVLAKPQNTAEVQKVQLTGE
PVPMARCVSTGGRPPAQITWHSDLGGMPNTSQVPGFLSGTVTVTSLWILVPSSQVDGKNVTCKVEHESFEK
PQLLTVNLTVYYPPEVSISGYDNNWYLGQNEATLTCDARSNPEPTGYNWSTTMGPLPPFAVAQGAQLLIRP

[chemical structure]

[chemical structure]

[chemical structure]

RTPEVTCVVVDVSHEDPEVKFNWYVDGVEVHNAKTKPREEQYNSTYRVVSVLTVLHQDWLNGKEYKCK

[chemical structure]

[chemical structure]

SEQ ID NO: 251 (single-chain ″wildtype″ IFN-γ bomodimer; linker is bolded; wildtype IFN-γ monomer is
italicized)
QDPYVKEAENLKKYFNAGHSDVADNGTLFLGILKNWKEESDRKIMQSQIVSFYFKLFKNEKDDQSIQKSVETIKE
DMNVKFFNSNKKKRDDFEKLTNYSVTDLNVORKAIHELIQVMAELSPAAKTGKRKRSOMLFRGGGGGGGGS
GGGGSGGGGSQDPYVKEAENLKKYFNAGHSDVADNGTLFLGILKNWKEESDRKIMQSQIVSFYFKLFKNFKDD
QSIQKSVETIKEDMNVKFFNSNKKKRDDFEKLINYSVTDLNVQRKAIHELIQVMAELSPAAKTGKRKRSQMLERG
SEQ ID NO: 252 (single-chain IFN-γ mutant A23V homodimer; linker is bolded; IFN-γ mutant monomer is
italicized)

[chemical structure]

DMNVKFFNSNKKKRDDFEKLTNYSVTDLNVQRKAIHELIQVMAELSPAAKTGKRKRSQMLFRGGGGSGGGGS

[chemical structure]

DQSIQKSVETIKEDMNVKFFNSNKKKRDDFEKLTNYSVTDLNVQRKAIHELIQVMAELSPAAKTGKRKRSQMLFR
G
SEQ ID NO: 253 (single-chain ″wildtype″ IL-12 heterodimer IL-12B (wt p40)-linker-IL-12A (wt p35);
linker is bolded)
IWELKKDVYVVELDWYPDAPGEMVVLTCDTPEEDGITWTLDOSSEVLGSGKTLTIQVKEFGDAGQYTCHKGGEV
LSHSLLLLHKKEDGIWSTDILKDQKEPKNKTFLRCEAKNYSGRFTCWWLTTISTDLTFSVKSSRGSSDPOGVTCGA
ATLSAERVRGDNKEYEYSVECQEDSACPAAEESLPIEVMVDAVHKLKYENYTSSFFIRDIIKPDPPKNLOLKPLKNS
RQVEVSWEYPDTWSTPHSYFSLTFCVQVQGKSKREKKDRVFTDKTSATVICRKNASISVRAQDRYYSSSWSEWASV
PCSGGGGSGGGSGGGGSRNLPVATPDPGMFPCLHHSQNLLRAVSNMLQKARQTLEFYPCTSEEIDHEDITKD
KTSTVEACLPLELTKNESCLNSRETSFITNGSCLASRKTSFMMALCLSSIYEDLKMYQVEFKTMNAKLLMDPKRQIF
LDQNMLAVIDELMQALNFNSETVPOKSSLEEPDFYKTKIKLCILLHAFRIRAVTIDRVMSYLNAS
SEQ ID NO: 254 (single-chain IL-12 mutant heterodimer IL-12B (p40 E59A/F60A)-linker-IL-12A (wt p35);
linker is bolded; IL-12 subunits are italicized)

[chemical structure]

LSHSLLLLHKKEDGIWSTDILKDOKEPKNKTFLRCEAKNYSGRFTCWWLTTISTDLTFSVKSSRGSSDPQGVTCGA
ATLSAERVRGDNKEYEYSVECQEDSACPAAEESLPIEVMVDAVHKLKYENYTSSFFIRDIIKPDPPKNLQLKPLKNS
RQVEVSWEYPDTWSTPHSYFSLTFCVQVQGKSKREKKDRVFTDKTSATVICRKNASISVRAQDRYYSSSWSEWASV
PCSGGGGSGGGSGGGGSRNLPVATPDPGMFPCLHHSONLLRAVSNMLOKAROTLEFYPCTSEEIDHEDITKD
KTSTVEACLPLELTKNESCLNSRETSFITNGSCLASRKTSFMMALCLSSIYEDLKMYQVEFKTMNAKLLMDPKRQIF
LDQNMLAVIDELMQALNENSETVPQKSSLEEPDFYKTKIKLCILLHAFRIRAVTIDRVMSYLNAS

1-58. (canceled)

59. An immunomodulatory molecule comprising a first binding domain specifically recognizing a first target molecule and a second binding domain specifically recognizing a second target molecule, wherein the first binding domain upon binding to the first target molecule up-regulates an immune response, and wherein the second binding domain upon binding to the second target molecule down-regulates the immune response, wherein the first binding domain is an immunostimulatory cytokine or variant thereof and the second binding domain is an agonist of an inhibitory checkpoint molecule.

60. The immunomodulatory molecule of claim 59, wherein the immunostimulatory cytokine or variant thereof is selected from the group consisting of IL-1, IL-2, IL-3, IL-4, IL-5, IL-6, IL-7, IL-8, IL-9, IL-12, IL-15, IL-17, IL-18, IL-21, IL-22, IL-23, IL-27, IFN-α, IFN-β, IFN-γ, TNF-α, erythropoietin, thrombopoietin, G-CSF, M-CSF, SCF, and GM-CSF.

61. The immunomodulatory molecule of claim 60, wherein the immunostimulatory cytokine or variant thereof is IL-12 or variant thereof.

62. The immunomodulatory molecule of claim 61, wherein the IL-12 variant comprises one or more mutations within the p40 subunit at a position selected from the group consisting of E45, Q56, V57, K58, E59, F60, G61, D62, A63, G64, Q65, and C177 relative to a wildtype p40 subunit.

63. The immunomodulatory molecule of claim 62, wherein the IL-12 variant comprises an E59A mutation, an F60A mutation, an F60D mutation, or an E59A/F60A mutation within the p40 subunit relative to a wildtype p40 subunit.

64. The immunomodulatory molecule of claim 63, wherein the p40 subunit of the IL-12 variant comprises the amino acid sequence of any of SEQ ID NOs: 63-66 and 140.

65. The immunomodulatory molecule of claim 60, wherein the immunostimulatory cytokine or variant thereof is IL-2 or variant thereof.

66. The immunomodulatory molecule of claim 65, wherein the IL-2 variant comprises one or more mutations at a position selected from the group consisting of L18, Q22, F24, K35, R38, F42, K43, E61, P65, Q126, and S130 relative to a wildtype IL-2 (SEQ ID NO: 25).

67. The immunomodulatory molecule of claim 66, wherein the IL-2 variant comprises an R38D/K43E/E61R mutation, an L18R/Q22E/R38D/K43E/E61R mutation, an R38D/K43E/E61R/Q126T, an L18R/Q22E/R38D/K43E/E61R/Q126T mutation, or an L18R/Q22E/R38D/K43E/E61R/Q126T/S130R mutation relative to wildtype IL-2 (SEQ ID NO: 25).

68. The immunomodulatory molecule of claim 59, wherein the inhibitory checkpoint molecule is selected from the group consisting of PD-1, PD-L1, PD-L2, CTLA-4, LAG-3, TIM-3, HHLA2, CD47, CXCR4, CD160, CD73, BLTA, B7-H4, TIGIT, Siglec7, Siglec9, and VISTA.

69. The immunomodulatory molecule of claim 59, wherein the agonist of the inhibitory checkpoint molecule is a ligand or an antibody or antigen-binding fragment thereof.

70. The immunomodulatory molecule of claim 69,
(i) wherein the inhibitory checkpoint molecule is PD-1, and wherein the agonist of the inhibitory checkpoint molecule is PD-L1, PD-L2, or variant thereof;
(ii) wherein the inhibitory checkpoint molecule is TIGIT, and wherein the agonist of the inhibitory checkpoint molecule is CD 112, CD155, or variant thereof;
(iii) wherein the inhibitory checkpoint molecule is LAG-3, and wherein the agonist of the inhibitory checkpoint molecule is MHC II, LSECtin, or variant thereof;
(iv) wherein the inhibitory checkpoint molecule is TIM-3, and wherein the agonist of the inhibitory checkpoint molecule is Galectin-9, Caecam-1, HMGB-1, phosphatidylserine, or variant thereof; or
(v) wherein the inhibitory checkpoint molecule is CTLA-4, and wherein the agonist of the inhibitory checkpoint molecule is CD80, CD86, or variant thereof.

71. The immunomodulatory molecule of claim 59, wherein the immunomodulatory molecule comprises:
(i) an antigen-binding protein comprising an antigen-binding polypeptide and the first binding domain, wherein the antigen-binding polypeptide comprises from N-terminus to C-terminus: the second binding domain or portion thereof, a hinge region, and an Fc domain subunit or portion thereof, and wherein the first binding domain is positioned at the hinge region;
(ii) an antigen-binding protein comprising an antigen-binding polypeptide, wherein the antigen-binding polypeptide comprises from N′ to C′: the first binding domain or portion thereof, the second binding domain or portion thereof, an optional hinge region, and an Fc domain subunit or portion thereof;
(iii) an antigen-binding protein comprising an antigen-binding polypeptide, wherein the antigen-binding polypeptide comprises from N-terminus to C-terminus: the second binding domain or portion thereof, an optional hinge region, an Fc domain subunit or portion thereof, and the first binding domain or portion thereof;
(iv) an antigen-binding protein comprising an antigen-binding polypeptide, wherein the antigen-binding polypeptide comprises from N-terminus to C-terminus: the second binding domain or portion thereof, an optional hinge region, an Fc domain subunit or portion thereof, and the first binding domain or portion thereof.

72. The immunomodulatory molecule of claim 59, wherein the immunomodulatory molecule comprises:
(i) a first antigen-binding polypeptide comprising from N-terminus to C-terminus: a first PD-L2 or PD-L1 or variant thereof, a second PD-L2 or PD-L1 or variant thereof, a p35 subunit and a p40 subunit of an IL-12 or variant thereof positioned in tandem at a first hinge region, and a first subunit of an Fc domain or portion thereof; a second antigen-binding polypeptide comprising from N-terminus to C-terminus: a VH, an optional CH1, a second hinge region, and a second subunit of the Fc domain or portion thereof; and a third antigen-binding polypeptide comprising from N-terminus to C-terminus: a VL, and an optional CL; wherein the VH and the VL and optionally the CH1 and the CL form a third binding domain specifically recognizing a third target molecule;
(ii) a first antigen-binding polypeptide comprising from N-terminus to C-terminus: a first VH, an optional first CH1, a p35 subunit and a p40 subunit of an IL-12 or variant thereof positioned in tandem at a first hinge region, and a first subunit of an Fc domain or portion thereof; a second antigen-binding polypeptide comprising from N-terminus to C-terminus: a second VH, an optional second CH1, a second hinge region, and a second subunit of the Fc domain or portion thereof; a third antigen-binding polypeptide comprising from N-terminus to C-terminus: a first VL, and an optional first CL; and a fourth antigen-binding polypeptide comprising from N-terminus to C-terminus: a second VL, and an optional second CL, wherein the first VH and the first VL and optionally the first CH1 and the first CL form the second binding domain which is an agonist antigen-binding fragment specifically recognizing PD-1, and wherein the second VH and the second VL and optionally the second CH1 and the second CL form a third binding domain specifically recognizing a third target molecule;
(iii) a first antigen-binding polypeptide comprising from N-terminus to C-terminus: a first PD-L2 or PD-L1 or variant thereof, a p35 subunit and a p40 subunit of an IL-12 or variant thereof positioned in tandem at a first hinge region, and a first subunit of an Fc domain or portion thereof; and a second antigen-binding polypeptide comprising from N-terminus to C-terminus: a second PD-L2 or PD-L1 or variant thereof, a second hinge region, and a second subunit of an Fc domain or portion thereof;
(iv) a first antigen-binding polypeptide comprising from N-terminus to C-terminus: a first PD-L2 or PD-L1 or variant thereof, a second PD-L2 or PD-L1 or variant thereof, a p35 subunit and a p40 subunit of an IL-12 or variant thereof positioned in tandem at a first hinge region, and a first subunit of an Fc domain or portion thereof; and a second antigen-binding polypeptide comprising from N-terminus to C-terminus: a third PD-L2 or PD-L1 or variant thereof, a fourth PD-L2 or PD-L1 or variant thereof, a second hinge region, and a second subunit of the Fc domain or portion thereof;
(v) a first antigen-binding polypeptide comprising from N-terminus to C-terminus: a first PD-L2 or PD-L1 or variant thereof, a p35 subunit of an IL-12 or variant thereof positioned at a first hinge region, and a first subunit of an Fc domain or portion thereof; and a second antigen-binding polypeptide comprising from N-terminus to C-terminus: a second PD-L2 or PD-L1 or variant thereof, a p40 subunit of an IL-12 or variant thereof positioned at a second hinge region, and a second subunit of the Fc domain or portion thereof;
(vi) a first antigen-binding polypeptide comprising from N-terminus to C-terminus: a p35 subunit or a p40 subunit of an IL-12 or variant thereof positioned at a first hinge region, and a first subunit of an Fc domain or portion thereof; and a second antigen-binding polypeptide comprising from N-terminus to C-terminus: a first PD-L2 or PD-L1 or variant thereof, a second PD-L2 or PD-L1 or variant thereof, a p40 subunit or a p35 subunit of an IL-12 or variant thereof positioned at a second hinge region, and a second subunit of the Fc domain or portion thereof;
(vii) a first antigen-binding polypeptide comprising from N-terminus to C-terminus: a first VH, an optional first CH1, a p35 subunit or a p40 subunit of an IL-12 or variant thereof positioned at a first hinge region, and a first subunit of an Fc domain or portion thereof; a second antigen-binding polypeptide comprising from N-terminus to C-terminus: a second VH, an optional second CH1, a p40 subunit or a p35 subunit of an IL-12 or variant thereof positioned at a second hinge region, and a second subunit of the Fc domain or portion thereof; a third antigen-binding polypeptide comprising from N-terminus to C-terminus: a first VL, and an optional first CL; and a fourth antigen-binding polypeptide comprising from N-terminus to C-terminus: a second VL, and an optional second CL, wherein the first VH and the first VL and optionally the first CH1 and the first CL form the second binding domain which is an agonist antigen-binding fragment specifically recognizing PD-1, and wherein the second VH and the second VL and optionally the second CH1 and the second CL form a third binding domain specifically recognizing a third target molecule;
(viii) a first antigen-binding polypeptide comprising from N-terminus to C-terminus: a first PD-L2 or PD-L1 or variant thereof, an IL-2 or variant thereof, a first hinge region, a first subunit of an Fc domain or portion thereof; and a second antigen-binding polypeptide comprising from N-terminus to C-terminus: a second PD-L2 or PD-L1 or variant thereof, a p35 subunit and a p40 subunit of an IL-12 or variant thereof connected in tandem, a second hinge region, and a second subunit of the Fc domain or portion thereof;
(ix) a first antigen-binding polypeptide comprising from N-terminus to C-terminus: a third binding domain, an IL-2 or variant thereof, a first hinge region, a first subunit of an Fc domain or portion thereof; and ii) a second antigen-binding polypeptide comprising from N-terminus to C-terminus: a PD-L2 or PD-L1 or variant thereof, a p35 subunit and a p40 subunit of an IL-12 or variant thereof connected in tandem, a second hinge region, and a second subunit of the Fc domain or portion thereof, wherein the third binding domain is a Fab or sdAb specifically recognizing TIGIT, TIM3, LAG3, CTLA4, CD16A, HER2, Nectin-4, Trop2, or CLDN18.2;
(x) a first antigen-binding polypeptide comprising from N-terminus to C-terminus: a first VH, an optional first CH1, a first hinge region, and a first subunit of an Fc domain or portion thereof; a second antigen-binding polypeptide comprising from N-terminus to C-terminus: a second VH, an optional second CH1, a second hinge region, and a second subunit of the Fc domain or portion thereof; a third antigen-binding polypeptide comprising from N-terminus to C-terminus: a p35 subunit and a p40 subunit of an IL-12 or variant thereof fused in tandem, a first VL, and an optional first CL; and a fourth antigen-binding polypeptide comprising from N-terminus to C-terminus: a second VL, and an optional second CL, wherein the first VH and the first VL and optionally the first CH1 and the first CL form the second binding domain which is an agonist antigen-binding fragment specifically recognizing PD-1, and wherein the second VH and the second VL and optionally the second CH1 and the second CL form a third binding domain specifically recognizing a third target molecule; or
(xi) a first antigen-binding polypeptide comprising from N-terminus to C-terminus: a VH, an optional CH1, a first hinge region, and a first subunit of an Fc domain or portion thereof; a second antigen-binding polypeptide comprising from N-terminus to C-terminus: a first PD-L2 or PD-L1 or variant thereof, a second PD-L2 or PD-L1 or variant thereof, a second hinge region, and a second subunit of the Fc domain or portion thereof; and a third antigen-binding polypeptide comprising from N-terminus to C-terminus: a p35 subunit and a p40 subunit of an IL-12 or variant thereof fused in tandem, a VL, and an optional CL, wherein the VH and the VL and optionally the CH1 and the CL form the second binding domain which is an agonist antigen-binding fragment specifically recognizing PD-1.

73. The immunomodulatory molecule of claim 59, wherein the immunomodulatory molecule comprises:
(i) a first antigen-binding polypeptide comprising from N-terminus to C-terminus: a first PD-L2 or PD-L1 or variant thereof, a p35 subunit of an IL-12 or variant thereof positioned at a first hinge region, and a first subunit of an Fc domain or portion thereof; and a second antigen-binding polypeptide comprising from N-terminus to C-terminus: a second PD-L2 or PD-L1 or variant thereof, a p40 subunit of an IL-12 or variant thereof positioned at a second hinge region, and a second subunit of the Fc domain or portion thereof; or
(ii) a first antigen-binding polypeptide comprising from N-terminus to C-terminus: a first VH, an optional first CH1, a p35 subunit or a p40 subunit of an IL-12 or variant thereof positioned at a first hinge region, and a first subunit of an Fc domain or portion thereof; a second antigen-binding polypeptide comprising from N-terminus to C-terminus: a second VH, an optional second CH1, a p40 subunit or a p35 subunit of an IL-12 or variant thereof positioned at a second hinge region, and a second subunit of the Fc domain or portion thereof; a third antigen-binding polypeptide comprising from N-terminus to C-terminus: a first VL, and an optional first CL; and a fourth antigen-binding polypeptide comprising from N-terminus to C-terminus: a second VL, and an optional second CL, wherein the first VH and the first VL and optionally the first CH1 and the first CL form the second binding domain which is an agonist antigen-binding fragment specifically recognizing PD-1, wherein the second VH and the second VL and optionally the second CH1 and the second CL form a third binding domain specifically recognizing a third target molecule.

74. A pharmaceutical composition comprising the immunomodulatory molecule of claim 59, and optionally a pharmaceutical acceptable carrier.

75. A method of treating a disease or disorder in an individual, comprising administering to the individual an effective amount of the immunomodulatory molecule of claim 59.

76. An isolated nucleic acid or a vector encoding the immunomodulatory molecule of claim 59.

77. A host cell comprising the isolated nucleic acid or the vector of claim 76.

78. A method of producing an immunomodulatory molecule, comprising:
(a) culturing the host cell of claim 77 under a condition effective to express the encoded immunomodulatory molecule; and
(b) obtaining the expressed immunomodulatory molecule from said host cell.

The application's sequence listing, which the Patent Office published only in electronic form, follows.

SEQUENCE LISTING (254 sequences)

SEQ ID NO: 1 - protein, 356 aa, Homo sapiens
KAMHVAQPAVVLASSRGIASFVCEYASPGKATEVRVTVLRQADSQVTEVCAATYMMGNELTFLDDSICTGTSSGNQVNLTIQGLRAMDTGLYICKVELMYPPPYYLGIGNGTQIYVIDPEPCPDSDGSGDKTHTCPPCPAPEKKGGPSVFLFPPKPKDTLMISRTPEVTCVVVDVSHEDPEVKFNWYVDGVEVHNAKTKPREEQYNSTYRVVSVLTVLHQDWLNGKEYKCKVSNKALPAPIEKTISKAKGQPREPQVYVLPPSREEMTKNQVSLLCLVKGFYPSDIAVEWESNGQPENRYMTWPPVLDSDGSFFLYSKLTVDKSRWQQGNVFSCSVMHEALHNHYTQKSLSLSPGK

SEQ ID NO: 2 - protein, 895 aa, Homo sapiens
KAMHVAQPAVVLASSRGIASFVCEYASPGKATEVRVTVLRQADSQVTEVCAATYMMGNELTFLDDSICTGTSSGNQVNLTIQGLRAMDTGLYICKVELMYPPPYYLGIGNGTQIYVIDPEPCPDSDGSGDKTHTCPPCPAPEDEGGPSVFLFPPKPKDTLMISRTPEVTCVVVDVSHEDPEVKFNWYVDGVEVHNAKTKPREEQYNSTYRVVSVLTVLHQDWLNGKEYKCKVSNKALPAPIEKTISKAKGQPREPQVYVYPPSREEMTKNQVSLTCLVKGFYPSDIAVEWESNGQPENNYKTTPPVLDEDGSFALVSKLTVDKSRWQQGNVFSCSVMHEALHNHYTQKSLSLSPGKGGGGSGGGGSGGGGSIWELKKDVYVVELDWYPDAPGEMVVLTCDTPEEDGITWTLDQSSEVLGSGKTLTIQVKAAGDAGQYTCHKGGEVLSHSLLLLHKKEDGIWSTDILKDQKEPKNKTFLRCEAKNYSGRFTCWWLTTISTDLTFSVKSSRGSSDPQGVTCGAATLSAERVRGDNKEYEYSVECQEDSACPAAEESLPIEVMVDAVHKLKYENYTSSFFIRDIIKPDPPKNLQLKPLKNSRQVEVSWEYPDTWSTPHSYFSLTFCVQVQGKSKREKKDRVFTDKTSATVICRKNASISVRAQDRYYSSSWSEWASVPCSGGGGSGGGGSGGGGSGGGGSGRNLPVATPDPGMFPCLHHSQNLLRAVSNMLQKARQTLEFYPCTSEEIDHEDITKDKTSTVEACLPLELTKNESCLNSRETSFITNGSCLASRKTSFMMALCLSSIYEDLKMYQVEFKTMNAKLLMDPKRQIFLDQNMLAVIDELMQALNFNSETVPQKSSLEEPDFYKTKIKLCILLHAFRIRAVTIDRVMSYLNAS

SEQ ID NO: 3 - protein, 895 aa, Homo sapiens
KAMHVAQPAVVLASSRGIASFVCEYASPGKATEVRVTVLRQADSQVTEVCAATYMMGNELTFLDDSICTGTSSGNQVNLTIQGLRAMDTGLYICKVELMYPPPYYLGIGNGTQIYVIDPEPCPDSDGSGDKTHTCPPCPAPEDEGGPSVFLFPPKPKDTLMISRTPEVTCVVVDVSHEDPEVKFNWYVDGVEVHNAKTKPREEQYNSTYRVVSVLTVLHQDWLNGKEYKCKVSNKALPAPIEKTISKAKGQPREPQVYVYPPSREEMTKNQVSLTCLVKGFYPSDIAVEWESNGQPENNYKTTPPVLDEDGSFALVSKLTVDKSRWQQGNVFSCSVMHEALHNHYTQKSLSLSPGKGGGGSGGGGSGGGGSIWELKKDVYVVELDWYPDAPGEMVVLTCDTPEEDGITWTLDQSSEVLGSGKTLTIQVKEAGDAGQYTCHKGGEVLSHSLLLLHKKEDGIWSTDILKDQKEPKNKTFLRCEAKNYSGRFTCWWLTTISTDLTFSVKSSRGSSDPQGVTCGAATLSAERVRGDNKEYEYSVECQEDSACPAAEESLPIEVMVDAVHKLKYENYTSSFFIRDIIKPDPPKNLQLKPLKNSRQVEVSWEYPDTWSTPHSYFSLTFCVQVQGKSKREKKDRVFTDKTSATVICRKNASISVRAQDRYYSSSWSEWASVPCSGGGGSGGGGSGGGGSGGGGSGRNLPVATPDPGMFPCLHHSQNLLRAVSNMLQKARQTLEFYPCTSEEIDHEDITKDKTSTVEACLPLELTKNESCLNSRETSFITNGSCLASRKTSFMMALCLSSIYEDLKMYQVEFKTMNAKLLMDPKRQIFLDQNMLAVIDELMQALNFNSETVPQKSSLEEPDFYKTKIKLCILLHAFRIRAVTIDRVMSYLNAS

SEQ ID NO: 4 - protein, 880 aa, Homo sapiens
KAMHVAQPAVVLASSRGIASFVCEYASPGKATEVRVTVLRQADSQVTEVCAATYMMGNELTFLDDSICTGTSSGNQVNLTIQGLRAMDTGLYICKVELMYPPPYYLGIGNGTQIYVIDPEPCPDSDGSGIWELKKDVYVVELDWYPDAPGEMVVLTCDTPEEDGITWTLDQSSEVLGSGKTLTIQVKAAGDAGQYTCHKGGEVLSHSLLLLHKKEDGIWSTDILKDQKEPKNKTFLRCEAKNYSGRFTCWWLTTISTDLTFSVKSSRGSSDPQGVTCGAATLSAERVRGDNKEYEYSVECQEDSACPAAEESLPIEVMVDAVHKLKYENYTSSFFIRDIIKPDPPKNLQLKPLKNSRQVEVSWEYPDTWSTPHSYFSLTFCVQVQGKSKREKKDRVFTDKTSATVICRKNASISVRAQDRYYSSSWSEWASVPCSGGGGSGGGGSGGGGSGGGGSGRNLPVATPDPGMFPCLHHSQNLLRAVSNMLQKARQTLEFYPCTSEEIDHEDITKDKTSTVEACLPLELTKNESCLNSRETSFITNGSCLASRKTSFMMALCLSSIYEDLKMYQVEFKTMNAKLLMDPKRQIFLDQNMLAVIDELMQALNFNSETVPQKSSLEEPDFYKTKIKLCILLHAFRIRAVTIDRVMSYLNASDKTHTCPPCPAPEDEGGPSVFLFPPKPKDTLMISRTPEVTCVVVDVSHEDPEVKFNWYVDGVEVHNAKTKPREEQYNSTYRVVSVLTVLHQDWLNGKEYKCKVSNKALPAPIEKTISKAKGQPREPQVYVYPPSREEMTKNQVSLTCLVKGFYPSDIAVEWESNGQPENNYKTTPPVLDEDGSFALVSKLTVDKSRWQQGNVFSCSVMHEALHNHYTQKSLSLSPGK

SEQ ID NO: 5 - protein, 880 aa, Homo sapiens
KAMHVAQPAVVLASSRGIASFVCEYASPGKATEVRVTVLRQADSQVTEVCAATYMMGNELTFLDDSICTGTSSGNQVNLTIQGLRAMDTGLYICKVELMYPPPYYLGIGNGTQIYVIDPEPCPDSDGSGIWELKKDVYVVELDWYPDAPGEMVVLTCDTPEEDGITWTLDQSSEVLGSGKTLTIQVKEAGDAGQYTCHKGGEVLSHSLLLLHKKEDGIWSTDILKDQKEPKNKTFLRCEAKNYSGRFTCWWLTTISTDLTFSVKSSRGSSDPQGVTCGAATLSAERVRGDNKEYEYSVECQEDSACPAAEESLPIEVMVDAVHKLKYENYTSSFFIRDIIKPDPPKNLQLKPLKNSRQVEVSWEYPDTWSTPHSYFSLTFCVQVQGKSKREKKDRVFTDKTSATVICRKNASISVRAQDRYYSSSWSEWASVPCSGGGGSGGGGSGGGGSGGGGSGRNLPVATPDPGMFPCLHHSQNLLRAVSNMLQKARQTLEFYPCTSEEIDHEDITKDKTSTVEACLPLELTKNESCLNSRETSFITNGSCLASRKTSFMMALCLSSIYEDLKMYQVEFKTMNAKLLMDPKRQIFLDQNMLAVIDELMQALNFNSETVPQKSSLEEPDFYKTKIKLCILLHAFRIRAVTIDRVMSYLNASDKTHTCPPCPAPEDEGGPSVFLFPPKPKDTLMISRTPEVTCVVVDVSHEDPEVKFNWYVDGVEVHNAKTKPREEQYNSTYRVVSVLTVLHQDWLNGKEYKCKVSNKALPAPIEKTISKAKGQPREPQVYVYPPSREEMTKNQVSLTCLVKGFYPSDIAVEWESNGQPENNYKTTPPVLDEDGSFALVSKLTVDKSRWQQGNVFSCSVMHEALHNHYTQKSLSLSPGK

SEQ ID NO: 6 - protein, 450 aa, Homo sapiens
FTVTVPKDLYVVEYGSNMTIECKFPVEKQLDLAALIVYWEMEDKNIIQFVHGEEDLKVQHSSYRQRARLLKDQLSLGNAALQITDVKLQDAGVYRCMISYGGADYKRITVKVNAPYNKINQRILVVDPVTSEHELTCQAEGYPKAEVIWTSSDHQVLSGKTTTTNSKREEKLFNVTSTLRINTTTNEIFYCTFRRLDPEENHTAELVIPELPLAHPPNERGSGDKTHTCPPCPAPEKKGGPSVFLFPPKPKDTLMISRTPEVTCVVVDVSHEDPEVKFNWYVDGVEVHNAKTKPREEQYNSTYRVVSVLTVLHQDWLNGKEYKCKVSNKALPAPIEKTISKAKGQPREPQVYVLPPSREEMTKNQVSLLCLVKGFYPSDIAVEWESNGQPENRYMTWPPVLDSDGSFFLYSKLTVDKSRWQQGNVFSCSVMHEALHNHYTQKSLSLSPGK

SEQ ID NO: 7 - protein, 989 aa, Homo sapiens
FTVTVPKDLYVVEYGSNMTIECKFPVEKQLDLAALIVYWEMEDKNIIQFVHGEEDLKVQHSSYRQRARLLKDQLSLGNAALQITDVKLQDAGVYRCMISYGGADYKRITVKVNAPYNKINQRILVVDPVTSEHELTCQAEGYPKAEVIWTSSDHQVLSGKTTTTNSKREEKLFNVTSTLRINTTTNEIFYCTFRRLDPEENHTAELVIPELPLAHPPNERGSGDKTHTCPPCPAPEDEGGPSVFLFPPKPKDTLMISRTPEVTCVVVDVSHEDPEVKFNWYVDGVEVHNAKTKPREEQYNSTYRVVSVLTVLHQDWLNGKEYKCKVSNKALPAPIEKTISKAKGQPREPQVYVYPPSREEMTKNQVSLTCLVKGFYPSDIAVEWESNGQPENNYKTTPPVLDEDGSFALVSKLTVDKSRWQQGNVFSCSVMHEALHNHYTQKSLSLSPGKGGGGSGGGGSGGGGSIWELKKDVYVVELDWYPDAPGEMVVLTCDTPEEDGITWTLDQSSEVLGSGKTLTIQVKAAGDAGQYTCHKGGEVLSHSLLLLHKKEDGIWSTDILKDQKEPKNKTFLRCEAKNYSGRFTCWWLTTISTDLTFSVKSSRGSSDPQGVTCGAATLSAERVRGDNKEYEYSVECQEDSACPAAEESLPIEVMVDAVHKLKYENYTSSFFIRDIIKPDPPKNLQLKPLKNSRQVEVSWEYPDTWSTPHSYFSLTFCVQVQGKSKREKKDRVFTDKTSATVICRKNASISVRAQDRYYSSSWSEWASVPCSGGGGSGGGGSGGGGSGGGGSGRNLPVATPDPGMFPCLHHSQNLLRAVSNMLQKARQTLEFYPCTSEEIDHEDITKDKTSTVEACLPLELTKNESCLNSRETSFITNGSCLASRKTSFMMALCLSSIYEDLKMYQVEFKTMNAKLLMDPKRQIFLDQNMLAVIDELMQALNFNSETVPQKSSLEEPDFYKTKIKLCILLHAFRIRAVTIDRVMSYLNAS

SEQ ID NO: 8 - protein, 989 aa, Homo sapiens
FTVTVPKDLYVVEYGSNMTIECKFPVEKQLDLAALIVYWEMEDKNIIQFVHGEEDLKVQHSSYRQRARLLKDQLSLGNAALQITDVKLQDAGVYRCMISYGGADYKRITVKVNAPYNKINQRILVVDPVTSEHELTCQAEGYPKAEVIWTSSDHQVLSGKTTTTNSKREEKLFNVTSTLRINTTTNEIFYCTFRRLDPEENHTAELVIPELPLAHPPNERGSGDKTHTCPPCPAPEDEGGPSVFLFPPKPKDTLMISRTPEVTCVVVDVSHEDPEVKFNWYVDGVEVHNAKTKPREEQYNSTYRVVSVLTVLHQDWLNGKEYKCKVSNKALPAPIEKTISKAKGQPREPQVYVYPPSREEMTKNQVSLTCLVKGFYPSDIAVEWESNGQPENNYKTTPPVLDEDGSFALVSKLTVDKSRWQQGNVFSCSVMHEALHNHYTQKSLSLSPGKGGGGSGGGGSGGGGSIWELKKDVYVVELDWYPDAPGEMVVLTCDTPEEDGITWTLDQSSEVLGSGKTLTIQVKEAGDAGQYTCHKGGEVLSHSLLLLHKKEDGIWSTDILKDQKEPKNKTFLRCEAKNYSGRFTCWWLTTISTDLTFSVKSSRGSSDPQGVTCGAATLSAERVRGDNKEYEYSVECQEDSACPAAEESLPIEVMVDAVHKLKYENYTSSFFIRDIIKPDPPKNLQLKPLKNSRQVEVSWEYPDTWSTPHSYFSLTFCVQVQGKSKREKKDRVFTDKTSATVICRKNASISVRAQDRYYSSSWSEWASVPCSGGGGSGGGGSGGGGSGGGGSGRNLPVATPDPGMFPCLHHSQNLLRAVSNMLQKARQTLEFYPCTSEEIDHEDITKDKTSTVEACLPLELTKNESCLNSRETSFITNGSCLASRKTSFMMALCLSSIYEDLKMYQVEFKTMNAKLLMDPKRQIFLDQNMLAVIDELMQALNFNSETVPQKSSLEEPDFYKTKIKLCILLHAFRIRAVTIDRVMSYLNAS

SEQ ID NO: 9 - protein, 974 aa, Homo sapiens
FTVTVPKDLYVVEYGSNMTIECKFPVEKQLDLAALIVYWEMEDKNIIQFVHGEEDLKVQHSSYRQRARLLKDQLSLGNAALQITDVKLQDAGVYRCMISYGGADYKRITVKVNAPYNKINQRILVVDPVTSEHELTCQAEGYPKAEVIWTSSDHQVLSGKTTTTNSKREEKLFNVTSTLRINTTTNEIFYCTFRRLDPEENHTAELVIPELPLAHPPNERGSGIWELKKDVYVVELDWYPDAPGEMVVLTCDTPEEDGITWTLDQSSEVLGSGKTLTIQVKAAGDAGQYTCHKGGEVLSHSLLLLHKKEDGIWSTDILKDQKEPKNKTFLRCEAKNYSGRFTCWWLTTISTDLTFSVKSSRGSSDPQGVTCGAATLSAERVRGDNKEYEYSVECQEDSACPAAEESLPIEVMVDAVHKLKYENYTSSFFIRDIIKPDPPKNLQLKPLKNSRQVEVSWEYPDTWSTPHSYFSLTFCVQVQGKSKREKKDRVFTDKTSATVICRKNASISVRAQDRYYSSSWSEWASVPCSGGGGSGGGGSGGGGSGGGGSGRNLPVATPDPGMFPCLHHSQNLLRAVSNMLQKARQTLEFYPCTSEEIDHEDITKDKTSTVEACLPLELTKNESCLNSRETSFITNGSCLASRKTSFMMALCLSSIYEDLKMYQVEFKTMNAKLLMDPKRQIFLDQNMLAVIDELMQALNFNSETVPQKSSLEEPDFYKTKIKLCILLHAFRIRAVTIDRVMSYLNASDKTHTCPPCPAPEDEGGPSVFLFPPKPKDTLMISRTPEVTCVVVDVSHEDPEVKFNWYVDGVEVHNAKTKPREEQYNSTYRVVSVLTVLHQDWLNGKEYKCKVSNKALPAPIEKTISKAKGQPREPQVYVYPPSREEMTKNQVSLTCLVKGFYPSDIAVEWESNGQPENNYKTTPPVLDEDGSFALVSKLTVDKSRWQQGNVFSCSVMHEALHNHYTQKSLSLSPGK

SEQ ID NO: 10 - protein, 974 aa, Homo sapiens
FTVTVPKDLYVVEYGSNMTIECKFPVEKQLDLAALIVYWEMEDKNIIQFVHGEEDLKVQHSSYRQRARLLKDQLSLGNAALQITDVKLQDAGVYRCMISYGGADYKRITVKVNAPYNKINQRILVVDPVTSEHELTCQAEGYPKAEVIWTSSDHQVLSGKTTTTNSKREEKLFNVTSTLRINTTTNEIFYCTFRRLDPEENHTAELVIPELPLAHPPNERGSGIWELKKDVYVVELDWYPDAPGEMVVLTCDTPEEDGITWTLDQSSEVLGSGKTLTIQVKEAGDAGQYTCHKGGEVLSHSLLLLHKKEDGIWSTDILKDQKEPKNKTFLRCEAKNYSGRFTCWWLTTISTDLTFSVKSSRGSSDPQGVTCGAATLSAERVRGDNKEYEYSVECQEDSACPAAEESLPIEVMVDAVHKLKYENYTSSFFIRDIIKPDPPKNLQLKPLKNSRQVEVSWEYPDTWSTPHSYFSLTFCVQVQGKSKREKKDRVFTDKTSATVICRKNASISVRAQDRYYSSSWSEWASVPCSGGGGSGGGGSGGGGSGGGGSGRNLPVATPDPGMFPCLHHSQNLLRAVSNMLQKARQTLEFYPCTSEEIDHEDITKDKTSTVEACLPLELTKNESCLNSRETSFITNGSCLASRKTSFMMALCLSSIYEDLKMYQVEFKTMNAKLLMDPKRQIFLDQNMLAVIDELMQALNFNSETVPQKSSLEEPDFYKTKIKLCILLHAFRIRAVTIDRVMSYLNASDKTHTCPPCPAPEDEGGPSVFLFPPKPKDTLMISRTPEVTCVVVDVSHEDPEVKFNWYVDGVEVHNAKTKPREEQYNSTYRVVSVLTVLHQDWLNGKEYKCKVSNKALPAPIEKTISKAKGQPREPQVYVYPPSREEMTKNQVSLTCLVKGFYPSDIAVEWESNGQPENNYKTTPPVLDEDGSFALVSKLTVDKSRWQQGNVFSCSVMHEALHNHYTQKSLSLSPGK

SEQ ID NO: 11 - protein, 450 aa, Homo sapiens
FTVTVPKDLYVVEYGSNMTIECKFPVEKQLDLAALQVFWMMEDKNIIQFVHGEEDLKVQHSSYRQRARLLKDQLSLGNAALQITDVKLQDAGVYTCLIAYKGADYKRITVKVNAPYNKINQRILVVDPVTSEHELTCQAEGYPKAEVIWTSSDHQVLSGKTTTTNSKREEKLFNVTSTLRINTTTNEIFYCTFRRLDPEENHTAELVIPELPLAHPPNERGSGDKTHTCPPCPAPEKKGGPSVFLFPPKPKDTLMISRTPEVTCVVVDVSHEDPEVKFNWYVDGVEVHNAKTKPREEQYNSTYRVVSVLTVLHQDWLNGKEYKCKVSNKALPAPIEKTISKAKGQPREPQVYVLPPSREEMTKNQVSLLCLVKGFYPSDIAVEWESNGQPENRYMTWPPVLDSDGSFFLYSKLTVDKSRWQQGNVFSCSVMHEALHNHYTQKSLSLSPGK

SEQ ID NO: 12 - protein, 989 aa, Homo sapiens
FTVTVPKDLYVVEYGSNMTIECKFPVEKQLDLAALQVFWMMEDKNIIQFVHGEEDLKVQHSSYRQRARLLKDQLSLGNAALQITDVKLQDAGVYTCLIAYKGADYKRITVKVNAPYNKINQRILVVDPVTSEHELTCQAEGYPKAEVIWTSSDHQVLSGKTTTTNSKREEKLFNVTSTLRINTTTNEIFYCTFRRLDPEENHTAELVIPELPLAHPPNERGSGDKTHTCPPCPAPEDEGGPSVFLFPPKPKDTLMISRTPEVTCVVVDVSHEDPEVKFNWYVDGVEVHNAKTKPREEQYNSTYRVVSVLTVLHQDWLNGKEYKCKVSNKALPAPIEKTISKAKGQPREPQVYVYPPSREEMTKNQVSLTCLVKGFYPSDIAVEWESNGQPENNYKTTPPVLDEDGSFALVSKLTVDKSRWQQGNVFSCSVMHEALHNHYTQKSLSLSPGKGGGGSGGGGSGGGGSIWELKKDVYVVELDWYPDAPGEMVVLTCDTPEEDGITWTLDQSSEVLGSGKTLTIQVKAAGDAGQYTCHKGGEVLSHSLLLLHKKEDGIWSTDILKDQKEPKNKTFLRCEAKNYSGRFTCWWLTTISTDLTFSVKSSRGSSDPQGVTCGAATLSAERVRGDNKEYEYSVECQEDSACPAAEESLPIEVMVDAVHKLKYENYTSSFFIRDIIKPDPPKNLQLKPLKNSRQVEVSWEYPDTWSTPHSYFSLTFCVQVQGKSKREKKDRVFTDKTSATVICRKNASISVRAQDRYYSSSWSEWASVPCSGGGGSGGGGSGGGGSGGGGSGRNLPVATPDPGMFPCLHHSQNLLRAVSNMLQKARQTLEFYPCTSEEIDHEDITKDKTSTVEACLPLELTKNESCLNSRETSFITNGSCLASRKTSFMMALCLSSIYEDLKMYQVEFKTMNAKLLMDPKRQIFLDQNMLAVIDELMQALNFNSETVPQKSSLEEPDFYKTKIKLCILLHAFRIRAVTIDRVMSYLNAS

SEQ ID NO: 13 - protein, 989 aa, Homo sapiens
FTVTVPKDLYVVEYGSNMTIECKFPVEKQLDLAALQVFWMMEDKNIIQFVHGEEDLKVQHSSYRQRARLLKDQLSLGNAALQITDVKLQDAGVYTCLIAYKGADYKRITVKVNAPYNKINQRILVVDPVTSEHELTCQAEGYPKAEVIWTSSDHQVLSGKTTTTNSKREEKLFNVTSTLRINTTTNEIFYCTFRRLDPEENHTAELVIPELPLAHPPNERGSGDKTHTCPPCPAPEDEGGPSVFLFPPKPKDTLMISRTPEVTCVVVDVSHEDPEVKFNWYVDGVEVHNAKTKPREEQYNSTYRVVSVLTVLHQDWLNGKEYKCKVSNKALPAPIEKTISKAKGQPREPQVYVYPPSREEMTKNQVSLTCLVKGFYPSDIAVEWESNGQPENNYKTTPPVLDEDGSFALVSKLTVDKSRWQQGNVFSCSVMHEALHNHYTQKSLSLSPGKGGGGSGGGGSGGGGSIWELKKDVYVVELDWYPDAPGEMVVLTCDTPEEDGITWTLDQSSEVLGSGKTLTIQVKEAGDAGQYTCHKGGEVLSHSLLLLHKKEDGIWSTDILKDQKEPKNKTFLRCEAKNYSGRFTCWWLTTISTDLTFSVKSSRGSSDPQGVTCGAATLSAERVRGDNKEYEYSVECQEDSACPAAEESLPIEVMVDAVHKLKYENYTSSFFIRDIIKPDPPKNLQLKPLKNSRQVEVSWEYPDTWSTPHSYFSLTFCVQVQGKSKREKKDRVFTDKTSATVICRKNASISVRAQDRYYSSSWSEWASVPCSGGGGSGGGGSGGGGSGGGGSGRNLPVATPDPGMFPCLHHSQNLLRAVSNMLQKARQTLEFYPCTSEEIDHEDITKDKTSTVEACLPLELTKNESCLNSRETSFITNGSCLASRKTSFMMALCLSSIYEDLKMYQVEFKTMNAKLLMDPKRQIFLDQNMLAVIDELMQALNFNSETVPQKSSLEEPDFYKTKIKLCILLHAFRIRAVTIDRVMSYLNAS

SEQ ID NO: 14 - protein, 974 aa, Homo sapiens
FTVTVPKDLYVVEYGSNMTIECKFPVEKQLDLAALQVFWMMEDKNIIQFVHGEEDLKVQHSSYRQRARLLKDQLSLGNAALQITDVKLQDAGVYTCLIAYKGADYKRITVKVNAPYNKINQRILVVDPVTSEHELTCQAEGYPKAEVIWTSSDHQVLSGKTTTTNSKREEKLFNVTSTLRINTTTNEIFYCTFRRLDPEENHTAELVIPELPLAHPPNERGSGIWELKKDVYVVELDWYPDAPGEMVVLTCDTPEEDGITWTLDQSSEVLGSGKTLTIQVKAAGDAGQYTCHKGGEVLSHSLLLLHKKEDGIWSTDILKDQKEPKNKTFLRCEAKNYSGRFTCWWLTTISTDLTFSVKSSRGSSDPQGVTCGAATLSAERVRGDNKEYEYSVECQEDSACPAAEESLPIEVMVDAVHKLKYENYTSSFFIRDIIKPDPPKNLQLKPLKNSRQVEVSWEYPDTWSTPHSYFSLTFCVQVQGKSKREKKDRVFTDKTSATVICRKNASISVRAQDRYYSSSWSEWASVPCSGGGGSGGGGSGGGGSGGGGSGRNLPVATPDPGMFPCLHHSQNLLRAVSNMLQKARQTLEFYPCTSEEIDHEDITKDKTSTVEACLPLELTKNESCLNSRETSFITNGSCLASRKTSFMMALCLSSIYEDLKMYQVEFKTMNAKLLMDPKRQIFLDQNMLAVIDELMQALNFNSETVPQKSSLEEPDFYKTKIKLCILLHAFRIRAVTIDRVMSYLNASDKTHTCPPCPAPEDEGGPSVFLFPPKPKDTLMISRTPEVTCVVVDVSHEDPEVKFNWYVDGVEVHNAKTKPREEQYNSTYRVVSVLTVLHQDWLNGKEYKCKVSNKALPAPIEKTISKAKGQPREPQVYVYPPSREEMTKNQVSLTCLVKGFYPSDIAVEWESNGQPENNYKTTPPVLDEDGSFALVSKLTVDKSRWQQGNVFSCSVMHEALHNHYTQKSLSLSPGK

SEQ ID NO: 15 - protein, 974 aa, Homo sapiens
FTVTVPKDLYVVEYGSNMTIECKFPVEKQLDLAALQVFWMMEDKNIIQFVHGEEDLKVQHSSYRQRARLLKDQLSLGNAALQITDVKLQDAGVYTCLIAYKGADYKRITVKVNAPYNKINQRILVVDPVTSEHELTCQAEGYPKAEVIWTSSDHQVLSGKTTTTNSKREEKLFNVTSTLRINTTTNEIFYCTFRRLDPEENHTAELVIPELPLAHPPNERGSGIWELKKDVYVVELDWYPDAPGEMVVLTCDTPEEDGITWTLDQSSEVLGSGKTLTIQVKEAGDAGQYTCHKGGEVLSHSLLLLHKKEDGIWSTDILKDQKEPKNKTFLRCEAKNYSGRFTCWWLTTISTDLTFSVKSSRGSSDPQGVTCGAATLSAERVRGDNKEYEYSVECQEDSACPAAEESLPIEVMVDAVHKLKYENYTSSFFIRDIIKPDPPKNLQLKPLKNSRQVEVSWEYPDTWSTPHSYFSLTFCVQVQGKSKREKKDRVFTDKTSATVICRKNASISVRAQDRYYSSSWSEWASVPCSGGGGSGGGGSGGGGSGGGGSGRNLPVATPDPGMFPCLHHSQNLLRAVSNMLQKARQTLEFYPCTSEEIDHEDITKDKTSTVEACLPLELTKNESCLNSRETSFITNGSCLASRKTSFMMALCLSSIYEDLKMYQVEFKTMNAKLLMDPKRQIFLDQNMLAVIDELMQALNFNSETVPQKSSLEEPDFYKTKIKLCILLHAFRIRAVTIDRVMSYLNASDKTHTCPPCPAPEDEGGPSVFLFPPKPKDTLMISRTPEVTCVVVDVSHEDPEVKFNWYVDGVEVHNAKTKPREEQYNSTYRVVSVLTVLHQDWLNGKEYKCKVSNKALPAPIEKTISKAKGQPREPQVYVYPPSREEMTKNQVSLTCLVKGFYPSDIAVEWESNGQPENNYKTTPPVLDEDGSFALVSKLTVDKSRWQQGNVFSCSVMHEALHNHYTQKSLSLSPGK

SEQ ID NO: 16 - protein, 431 aa, Homo sapiens
LFTVTVPKELYIIEHGSNVTLECNFDTGSHVNLGAITASLQKVENDTSPHRERATLLEEQLPLGKASFHIPQVQVRDEGQYQCIIIYGVAWDYKYLTLKVKASYRKINTHILKVPETDEVELTCQATGYPLAEVSWPNVSVPANTSHSRTPEGLYQVTSVLRLKPPPGRNFSCVFWNTHVRELTLASIDLQSQMEPRTHPTGSGDKTHTCPPCPAPEKKGGPSVFLFPPKPKDTLMISRTPEVTCVVVDVSHEDPEVKFNWYVDGVEVHNAKTKPREEQYNSTYRVVSVLTVLHQDWLNGKEYKCKVSNKALPAPIEKTISKAKGQPREPQVYVLPPSREEMTKNQVSLLCLVKGFYPSDIAVEWESNGQPENRYMTWPPVLDSDGSFFLYSKLTVDKSRWQQGNVFSCSVMHEALHNHYTQKSLSLSPGK

SEQ ID NO: 17 - protein, 955 aa, Homo sapiens
LFTVTVPKELYIIEHGSNVTLECNFDTGSHVNLGAITASLQKVENDTSPHRERATLLEEQLPLGKASFHIPQVQVRDEGQYQCIIIYGVAWDYKYLTLKVKASYRKINTHILKVPETDEVELTCQATGYPLAEVSWPNVSVPANTSHSRTPEGLYQVTSVLRLKPPPGRNFSCVFWNTHVRELTLASIDLQSQMEPRTHPTGSGIWELKKDVYVVELDWYPDAPGEMVVLTCDTPEEDGITWTLDQSSEVLGSGKTLTIQVKAAGDAGQYTCHKGGEVLSHSLLLLHKKEDGIWSTDILKDQKEPKNKTFLRCEAKNYSGRFTCWWLTTISTDLTFSVKSSRGSSDPQGVTCGAATLSAERVRGDNKEYEYSVECQEDSACPAAEESLPIEVMVDAVHKLKYENYTSSFFIRDIIKPDPPKNLQLKPLKNSRQVEVSWEYPDTWSTPHSYFSLTFCVQVQGKSKREKKDRVFTDKTSATVICRKNASISVRAQDRYYSSSWSEWASVPCSGGGGSGGGGSGGGGSGGGGSGRNLPVATPDPGMFPCLHHSQNLLRAVSNMLQKARQTLEFYPCTSEEIDHEDITKDKTSTVEACLPLELTKNESCLNSRETSFITNGSCLASRKTSFMMALCLSSIYEDLKMYQVEFKTMNAKLLMDPKRQIFLDQNMLAVIDELMQALNFNSETVPQKSSLEEPDFYKTKIKLCILLHAFRIRAVTIDRVMSYLNASDKTHTCPPCPAPEDEGGPSVFLFPPKPKDTLMISRTPEVTCVVVDVSHEDPEVKFNWYVDGVEVHNAKTKPREEQYNSTYRVVSVLTVLHQDWLNGKEYKCKVSNKALPAPIEKTISKAKGQPREPQVYVYPPSREEMTKNQVSLTCLVKGFYPSDIAVEWESNGQPENNYKTTPPVLDEDGSFALVSKLTVDKSRWQQGNVFSCSVMHEALHNHYTQKSLSLSPGK

SEQ ID NO: 18 - protein, 955 aa, Homo sapiens
LFTVTVPKELYIIEHGSNVTLECNFDTGSHVNLGAITASLQKVENDTSPHRERATLLEEQLPLGKASFHIPQVQVRDEGQYQCIIIYGVAWDYKYLTLKVKASYRKINTHILKVPETDEVELTCQATGYPLAEVSWPNVSVPANTSHSRTPEGLYQVTSVLRLKPPPGRNFSCVFWNTHVRELTLASIDLQSQMEPRTHPTGSGIWELKKDVYVVELDWYPDAPGEMVVLTCDTPEEDGITWTLDQSSEVLGSGKTLTIQVKEAGDAGQYTCHKGGEVLSHSLLLLHKKEDGIWSTDILKDQKEPKNKTFLRCEAKNYSGRFTCWWLTTISTDLTFSVKSSRGSSDPQGVTCGAATLSAERVRGDNKEYEYSVECQEDSACPAAEESLPIEVMVDAVHKLKYENYTSSFFIRDIIKPDPPKNLQLKPLKNSRQVEVSWEYPDTWSTPHSYFSLTFCVQVQGKSKREKKDRVFTDKTSATVICRKNASISVRAQDRYYSSSWSEWASVPCSGGGGSGGGGSGGGGSGGGGSGRNLPVATPDPGMFPCLHHSQNLLRAVSNMLQKARQTLEFYPCTSEEIDHEDITKDKTSTVEACLPLELTKNESCLNSRETSFITNGSCLASRKTSFMMALCLSSIYEDLKMYQVEFKTMNAKLLMDPKRQIFLDQNMLAVIDELMQALNFNSETVPQKSSLEEPDFYKTKIKLCILLHAFRIRAVTIDRVMSYLNASDKTHTCPPCPAPEDEGGPSVFLFPPKPKDTLMISRTPEVTCVVVDVSHEDPEVKFNWYVDGVEVHNAKTKPREEQYNSTYRVVSVLTVLHQDWLNGKEYKCKVSNKALPAPIEKTISKAKGQPREPQVYVYPPSREEMTKNQVSLTCLVKGFYPSDIAVEWESNGQPENNYKTTPPVLDEDGSFALVSKLTVDKSRWQQGNVFSCSVMHEALHNHYTQKSLSLSPGK

SEQ ID NO: 19 - protein, 970 aa, Homo sapiens
LFTVTVPKELYIIEHGSNVTLECNFDTGSHVNLGAITASLQKVENDTSPHRERATLLEEQLPLGKASFHIPQVQVRDEGQYQCIIIYGVAWDYKYLTLKVKASYRKINTHILKVPETDEVELTCQATGYPLAEVSWPNVSVPANTSHSRTPEGLYQVTSVLRLKPPPGRNFSCVFWNTHVRELTLASIDLQSQMEPRTHPTGSGDKTHTCPPCPAPEDEGGPSVFLFPPKPKDTLMISRTPEVTCVVVDVSHEDPEVKFNWYVDGVEVHNAKTKPREEQYNSTYRVVSVLTVLHQDWLNGKEYKCKVSNKALPAPIEKTISKAKGQPREPQVYVYPPSREEMTKNQVSLTCLVKGFYPSDIAVEWESNGQPENNYKTTPPVLDEDGSFALVSKLTVDKSRWQQGNVFSCSVMHEALHNHYTQKSLSLSPGKGGGGSGGGGSGGGGSIWELKKDVYVVELDWYPDAPGEMVVLTCDTPEEDGITWTLDQSSEVLGSGKTLTIQVKAAGDAGQYTCHKGGEVLSHSLLLLHKKEDGIWSTDILKDQKEPKNKTFLRCEAKNYSGRFTCWWLTTISTDLTFSVKSSRGSSDPQGVTCGAATLSAERVRGDNKEYEYSVECQEDSACPAAEESLPIEVMVDAVHKLKYENYTSSFFIRDIIKPDPPKNLQLKPLKNSRQVEVSWEYPDTWSTPHSYFSLTFCVQVQGKSKREKKDRVFTDKTSATVICRKNASISVRAQDRYYSSSWSEWASVPCSGGGGSGGGGSGGGGSGGGGSGRNLPVATPDPGMFPCLHHSQNLLRAVSNMLQKARQTLEFYPCTSEEIDHEDITKDKTSTVEACLPLELTKNESCLNSRETSFITNGSCLASRKTSFMMALCLSSIYEDLKMYQVEFKTMNAKLLMDPKRQIFLDQNMLAVIDELMQALNFNSETVPQKSSLEEPDFYKTKIKLCILLHAFRIRAVTIDRVMSYLNAS

SEQ ID NO: 20 - protein, 970 aa, Homo sapiens
LFTVTVPKELYIIEHGSNVTLECNFDTGSHVNLGAITASLQKVENDTSPHRERATLLEEQLPLGKASFHIPQVQVRDEGQYQCIIIYGVAWDYKYLTLKVKASYRKINTHILKVPETDEVELTCQATGYPLAEVSWPNVSVPANTSHSRTPEGLYQVTSVLRLKPPPGRNFSCVFWNTHVRELTLASIDLQSQMEPRTHPTGSGDKTHTCPPCPAPEDEGGPSVFLFPPKPKDTLMISRTPEVTCVVVDVSHEDPEVKFNWYVDGVEVHNAKTKPREEQYNSTYRVVSVLTVLHQDWLNGKEYKCKVSNKALPAPIEKTISKAKGQPREPQVYVYPPSREEMTKNQVSLTCLVKGFYPSDIAVEWESNGQPENNYKTTPPVLDEDGSFALVSKLTVDKSRWQQGNVFSCSVMHEALHNHYTQKSLSLSPGKGGGGSGGGGSGGGGSIWELKKDVYVVELDWYPDAPGEMVVLTCDTPEEDGITWTLDQSSEVLGSGKTLTIQVKEAGDAGQYTCHKGGEVLSHSLLLLHKKEDGIWSTDILKDQKEPKNKTFLRCEAKNYSGRFTCWWLTTISTDLTFSVKSSRGSSDPQGVTCGAATLSAERVRGDNKEYEYSVECQEDSACPAAEESLPIEVMVDAVHKLKYENYTSSFFIRDIIKPDPPKNLQLKPLKNSRQVEVSWEYPDTWSTPHSYFSLTFCVQVQGKSKREKKDRVFTDKTSATVICRKNASISVRAQDRYYSSSWSEWASVPCSGGGGSGGGGSGGGGSGGGGSGRNLPVATPDPGMFPCLHHSQNLLRAVSNMLQKARQTLEFYPCTSEEIDHEDITKDKTSTVEACLPLELTKNESCLNSRETSFITNGSCLASRKTSFMMALCLSSIYEDLKMYQVEFKTMNAKLLMDPKRQIFLDQNMLAVIDELMQALNFNSETVPQKSSLEEPDFYKTKIKLCILLHAFRIRAVTIDRVMSYLNAS

SEQ ID NO: 21 - protein, 449 aa, Artificial Sequence
  Synthetic Construct
QVQLVESGGGVVQPGRSLRLDCKASGITFSNSGMHWVRQAPGKGLEWVAVIWYDGSKRYYADSVKGRFTISRDNSKNTLFLQMNSLRAEDTAVYYCATNDDYWGQGTLVTVSSASTKGPSVFPLAPSSKSTSGGTAALGCLVKDYFPEPVTVSWNSGALTSGVHTFPAVLQSSGLYSLSSVVTVPSSSLGTQTYICNVNHKPSNTKVDKKVEPKSCDKPGSGDKTHTCPPCPAPEKKGGPSVFLFPPKPKDTLMISRTPEVTCVVVDVSHEDPEVKFNWYVDGVEVHNAKTKPREEQYNSTYRVVSVLTVLHQDWLNGKEYKCKVSNKALPAPIEKTISKAKGQPREPQVYVLPPSREEMTKNQVSLLCLVKGFYPSDIAVEWESNGQPENRYMTWPPVLDSDGSFFLYSKLTVDKSRWQQGNVFSCSVMHEALHNHYTQKSLSLSPGK

SEQ ID NO: 22 - protein, 973 aa, Artificial Sequence
  Synthetic Construct
QVQLVESGGGVVQPGRSLRLDCKASGITFSNSGMHWVRQAPGKGLEWVAVIWYDGSKRYYADSVKGRFTISRDNSKNTLFLQMNSLRAEDTAVYYCATNDDYWGQGTLVTVSSASTKGPSVFPLAPSSKSTSGGTAALGCLVKDYFPEPVTVSWNSGALTSGVHTFPAVLQSSGLYSLSSVVTVPSSSLGTQTYICNVNHKPSNTKVDKKVEPKSCDKPGSGIWELKKDVYVVELDWYPDAPGEMVVLTCDTPEEDGITWTLDQSSEVLGSGKTLTIQVKAAGDAGQYTCHKGGEVLSHSLLLLHKKEDGIWSTDILKDQKEPKNKTFLRCEAKNYSGRFTCWWLTTISTDLTFSVKSSRGSSDPQGVTCGAATLSAERVRGDNKEYEYSVECQEDSACPAAEESLPIEVMVDAVHKLKYENYTSSFFIRDIIKPDPPKNLQLKPLKNSRQVEVSWEYPDTWSTPHSYFSLTFCVQVQGKSKREKKDRVFTDKTSATVICRKNASISVRAQDRYYSSSWSEWASVPCSGGGGSGGGGSGGGGSGGGGSGRNLPVATPDPGMFPCLHHSQNLLRAVSNMLQKARQTLEFYPCTSEEIDHEDITKDKTSTVEACLPLELTKNESCLNSRETSFITNGSCLASRKTSFMMALCLSSIYEDLKMYQVEFKTMNAKLLMDPKRQIFLDQNMLAVIDELMQALNFNSETVPQKSSLEEPDFYKTKIKLCILLHAFRIRAVTIDRVMSYLNASDKTHTCPPCPAPEDEGGPSVFLFPPKPKDTLMISRTPEVTCVVVDVSHEDPEVKFNWYVDGVEVHNAKTKPREEQYNSTYRVVSVLTVLHQDWLNGKEYKCKVSNKALPAPIEKTISKAKGQPREPQVYVYPPSREEMTKNQVSLTCLVKGFYPSDIAVEWESNGQPENNYKTTPPVLDEDGSFALVSKLTVDKSRWQQGNVFSCSVMHEALHNHYTQKSLSLSPGK

SEQ ID NO: 23 - protein, 973 aa, Artificial Sequence
  Synthetic Construct
QVQLVESGGGVVQPGRSLRLDCKASGITFSNSGMHWVRQAPGKGLEWVAVIWYDGSKRYYADSVKGRFTISRDNSKNTLFLQMNSLRAEDTAVYYCATNDDYWGQGTLVTVSSASTKGPSVFPLAPSSKSTSGGTAALGCLVKDYFPEPVTVSWNSGALTSGVHTFPAVLQSSGLYSLSSVVTVPSSSLGTQTYICNVNHKPSNTKVDKKVEPKSCDKPGSGIWELKKDVYVVELDWYPDAPGEMVVLTCDTPEEDGITWTLDQSSEVLGSGKTLTIQVKEAGDAGQYTCHKGGEVLSHSLLLLHKKEDGIWSTDILKDQKEPKNKTFLRCEAKNYSGRFTCWWLTTISTDLTFSVKSSRGSSDPQGVTCGAATLSAERVRGDNKEYEYSVECQEDSACPAAEESLPIEVMVDAVHKLKYENYTSSFFIRDIIKPDPPKNLQLKPLKNSRQVEVSWEYPDTWSTPHSYFSLTFCVQVQGKSKREKKDRVFTDKTSATVICRKNASISVRAQDRYYSSSWSEWASVPCSGGGGSGGGGSGGGGSGGGGSGRNLPVATPDPGMFPCLHHSQNLLRAVSNMLQKARQTLEFYPCTSEEIDHEDITKDKTSTVEACLPLELTKNESCLNSRETSFITNGSCLASRKTSFMMALCLSSIYEDLKMYQVEFKTMNAKLLMDPKRQIFLDQNMLAVIDELMQALNFNSETVPQKSSLEEPDFYKTKIKLCILLHAFRIRAVTIDRVMSYLNASDKTHTCPPCPAPEDEGGPSVFLFPPKPKDTLMISRTPEVTCVVVDVSHEDPEVKFNWYVDGVEVHNAKTKPREEQYNSTYRVVSVLTVLHQDWLNGKEYKCKVSNKALPAPIEKTISKAKGQPREPQVYVYPPSREEMTKNQVSLTCLVKGFYPSDIAVEWESNGQPENNYKTTPPVLDEDGSFALVSKLTVDKSRWQQGNVFSCSVMHEALHNHYTQKSLSLSPGK

SEQ ID NO: 24 - protein, 566 aa, Homo sapiens
LFTVTVPKELYIIEHGSNVTLECNFDTGSHVNLGAITASLQKVENDTSPHRERATLLEEQLPLGKASFHIPQVQVRDEGQYQCIIIYGVAWDYKYLTLKVKASYRKINTHILKVPETDEVELTCQATGYPLAEVSWPNVSVPANTSHSRTPEGLYQVTSVLRLKPPPGRNFSCVFWNTHVRELTLASIDLQSQMEPRTHPTGGGGSAPTSSSTKKTQLQLEHLLLDLQMILNGINNYKNPKLTDMLTFEFYMPKKATELKHLQCLERELKPLEEVLNLAQSKNFHLRPRDLISNINVIVLELKGSETTFMCEYADETATIVEFLNRWITFCQSIISTLTDKTHTCPPCPAPEDEGGPSVFLFPPKPKDTLMISRTPEVTCVVVDVSHEDPEVKFNWYVDGVEVHNAKTKPREEQYNSTYRVVSVLTVLHQDWLNGKEYKCKVSNKALPAPIEKTISKAKGQPREPQVYVYPPSREEMTKNQVSLTCLVKGFYPSDIAVEWESNGQPENNYKTTPPVLDEDGSFALVSKLTVDKSRWQQGNVFSCSVMHEALHNHYTQKSLSLSPGK

SEQ ID NO: 25 - protein, 133 aa, Homo sapiens [sequence omitted]

SEQ ID NO: 26 - protein, 133 aa, Artificial Sequence
  Synthetic Construct
APTSSSTKKTQLQLEHLLLDLQMILNGINNYKNPKLTDMLTFEFYMPKKATELKHLQCLERELKPLEEVLNLAQSKNFHLRPRDLISNINVIVLELKGSETTFMCEYADETATIVEFLNRWITFCQSIISTLT

SEQ ID NO: 27 - protein, 133 aa, Artificial Sequence
  Synthetic Construct
APTSSSTKKTQLQLEHLRLDLEMILNGINNYKNPKLTDMLTFEFYMPKKATELKHLQCLERELKPLEEVLNLAQSKNFHLRPRDLISNINVIVLELKGSETTFMCEYADETATIVEFLNRWITFCQSIISTLT

SEQ ID NO: 28 - protein, 133 aa, Artificial Sequence
  Synthetic Construct
APTSSSTKKTQLQLEHLLLDLQMILNGINNYKNPKLTDMLTFEFYMPKKATELKHLQCLERELKPLEEVLNLAQSKNFHLRPRDLISNINVIVLELKGSETTFMCEYADETATIVEFLNRWITFCTSIISTLT

SEQ ID NO: 29 - protein, 133 aa, Artificial Sequence
  Synthetic Construct
APTSSSTKKTQLQLEHLRLDLEMILNGINNYKNPKLTDMLTFEFYMPKKATELKHLQCLERELKPLEEVLNLAQSKNFHLRPRDLISNINVIVLELKGSETTFMCEYADETATIVEFLNRWITFCTSIISTLT

SEQ ID NO: 30 - protein, 133 aa, Artificial Sequence
  Synthetic Construct
APTSSSTKKTQLQLEHLRLDLEMILNGINNYKNPKLTDMLTFEFYMPKKATELKHLQCLERELKPLEEVLNLAQSKNFHLRPRDLISNINVIVLELKGSETTFMCEYADETATIVEFLNRWITFCTSIIRTLT

SEQ ID NO: 31 - protein, 165 aa, Homo sapiens
CDLPQTHSLGSRRTLMLLAQMRKISLFSCLKDRHDFGFPQEEFGNQFQKAETIPVLHEMIQQIFNLFSTKDSSAAWDETLLDKFYTELYQQLNDLEACVIQGVGVTETPLMKEDSILAVRKYFQRITLYLKEKKYSPCAWEVVRAEIMRSFSLSTNLQESLRSKE

SEQ ID NO: 32 - protein, 165 aa, Artificial Sequence
  Synthetic Construct
CDLPQTHSLGSRRTLMLLAQMRKISLFSCAKDRHDFGFPQEEFGNQFQKAETIPVLHEMIQQIFNLFSTKDSSAAWDETLLDKFYTELYQQLNDLEACVIQGVGVTETPLMKEDSILAVRKYFQRITLYLKEKKYSPCAWEVVRAEIMRSFSLSTNLQESLRSKE

SEQ ID NO: 33 - protein, 165 aa, Artificial Sequence
  Synthetic Construct
CDLPQTHSLGSRRTLMLLAQMRKISLFSCLADRHDFGFPQEEFGNQFQKAETIPVLHEMIQQIFNLFSTKDSSAAWDETLLDKFYTELYQQLNDLEACVIQGVGVTETPLMKEDSILAVRKYFQRITLYLKEKKYSPCAWEVVRAEIMRSFSLSTNLQESLRSKE

SEQ ID NO: 34 - protein, 165 aa, Artificial Sequence
  Synthetic Construct
CDLPQTHSLGSRRTLMLLAQMRKISLFSCLKARHDFGFPQEEFGNQFQKAETIPVLHEMIQQIFNLFSTKDSSAAWDETLLDKFYTELYQQLNDLEACVIQGVGVTETPLMKEDSILAVRKYFQRITLYLKEKKYSPCAWEVVRAEIMRSFSLSTNLQESLRSKE

SEQ ID NO: 35 - protein, 165 aa, Artificial Sequence
  Synthetic Construct
CDLPQTHSLGSRRTLMLLAQMRKISLFSCLKDAHDFGFPQEEFGNQFQKAETIPVLHEMIQQIFNLFSTKDSSAAWDETLLDKFYTELYQQLNDLEACVIQGVGVTETPLMKEDSILAVRKYFQRITLYLKEKKYSPCAWEVVRAEIMRSFSLSTNLQESLRSKE

SEQ ID NO: 36 - protein, 165 aa, Artificial Sequence
  Synthetic Construct
CDLPQTHSLGSRRTLMLLAQMRKISLFSCLKDRADFGFPQEEFGNQFQKAETIPVLHEMIQQIFNLFSTKDSSAAWDETLLDKFYTELYQQLNDLEACVIQGVGVTETPLMKEDSILAVRKYFQRITLYLKEKKYSPCAWEVVRAEIMRSFSLSTNLQESLRSKE

SEQ ID NO: 37 - protein, 165 aa, Artificial Sequence
  Synthetic Construct
CDLPQTHSLGSRRTLMLLAQMRKISLFSCLKDRHAFGFPQEEFGNQFQKAETIPVLHEMIQQIFNLFSTKDSSAAWDETLLDKFYTELYQQLNDLEACVIQGVGVTETPLMKEDSILAVRKYFQRITLYLKEKKYSPCAWEVVRAEIMRSFSLSTNLQESLRSKE

SEQ ID NO: 38 - protein, 138 aa, Artificial Sequence
  Synthetic Construct
QDPYVKEAENLKKYFNAGHSDVADNGTLFLGILKNWKEESDRKIMQSQIVSFYFKLFKNFKDDQSIQKSVETIKEDMNVKFFNSNKKKRDDFEKLTNYSVTDLNVQRKAIHELIQVMAELSPAAKTGKRKRSQMLFRG

SEQ ID NO: 39 - protein, 138 aa, Artificial Sequence
  Synthetic Construct
QDPYVKEAENLKKYFNAGHAAVADNGTLFLGILKNWKEESDRKIMQSQIVSFYFKLFKNFKDDQSIQKSVETIKEDMNVKFFNSNKKKRDDFEKLTNYSVTDLNVQRKAIHELIQVMAELSPAAKTGKRKRSQMLFRG

SEQ ID NO: 40 - protein, 138 aa, Artificial Sequence
  Synthetic Construct
QDPYVKEAENLKKYFNAGHSDASDNGTLFLGILKNWKEESDRKIMQSQIVSFYFKLFKNFKDDQSIQKSVETIKEDMNVKFFNSNKKKRDDFEKLTNYSVTDLNVQRKAIHELIQVMAELSPAAKTGKRKRSQMLFRG

SEQ ID NO: 41 - protein, 138 aa, Artificial Sequence
  Synthetic Construct
QDPYVKEAENLKKYFNAGHSDVVDNGTLFLGILKNWKEESDRKIMQSQIVSFYFKLFKNFKDDQSIQKSVETIKEDMNVKFFNSNKKKRDDFEKLTNYSVTDLNVQRKAIHELIQVMAELSPAAKTGKRKRSQMLFRG

SEQ ID NO: 42 - protein, 138 aa, Artificial Sequence
  Synthetic Construct
QDPYVKEAENLKKYFNAGHSDVAAAGTLFLGILKNWKEESDRKIMQSQIVSFYFKLFKNFKDDQSIQKSVETIKEDMNVKFFNSNKKKRDDFEKLTNYSVTDLNVQRKAIHELIQVMAELSPAAKTGKRKRSQMLFRG

SEQ ID NO: 43 - protein, 138 aa, Artificial Sequence
  Synthetic Construct
QDPYVKEAENLKKYFNAGHSDVEEKGTLFLGILKNWKEESDRKIMQSQIVSFYFKLFKNFKDDQSIQKSVETIKEDMNVKFFNSNKKKRDDFEKLTNYSVTDLNVQRKAIHELIQVMAELSPAAKTGKRKRSQMLFRG

SEQ ID NO: 44 - protein, 138 aa, Artificial Sequence
  Synthetic Construct
QDPYVKEAENLKKYFNAGHSDVQDNGTLFLGILKNWKEESDRKIMQSQIVSFYFKLFKNFKDDQSIQKSVETIKEDMNVKFFNSNKKKRDDFEKLTNYSVTDLNVQRKAIHELIQVMAELSPAAKTGKRKRSQMLFRG

SEQ ID NO: 45 - protein, 138 aa, Artificial Sequence
  Synthetic Construct
QDPYVKEAENLKKYFNAGHSKVADNGTLFLGILKNWKEESDRKIMQSQIVSFYFKLFKNFKDDQSIQKSVETIKEDMNVKFFNSNKKKRDDFEKLTNYSVTDLNVQRKAIHELIQVMAELSPAAKTGKRKRSQMLFRG

SEQ ID NO: 46 - protein, 297 aa, Artificial Sequence
  Synthetic Construct
QDPYVKEAENLKKYFNAGHSDVADNGTLFLGILKNWKEESDRKIMQSQIVSFYFKLFKNFKDDQSIQKSVETIKEDMNVKFFNSNKKKRDDFEKLTNYSVTDLNVQRKAIHELIQVMAELSPAAKTGKRKRSQMLFRGFEGGGSGGGGSGGGGSGGGGSQDPYVKEAENLKKYFNAGHSDVADNGTLFLGILKNWKEESDRKIMQSQIVSFYFKLFKNFKDDQSIQKSVETIKEDMNVKFFNSNKKKRDDFEKLTNYSVTDLNVQRKAIHELIQVMAELSPAAKTGKRKRSQMLFRG

SEQ ID NO: 47 - protein, 297 aa, Artificial Sequence
  Synthetic Construct
QDPYVKEAENLKKYFNAGHSDVVDNGTLFLGILKNWKEESDRKIMQSQIVSFYFKLFKNFKDDQSIQKSVETIKEDMNVKFFNSNKKKRDDFEKLTNYSVTDLNVQRKAIHELIQVMAELSPAAKTGKRKRSQMLFRGFEGGGSGGGGSGGGGSGGGGSQDPYVKEAENLKKYFNAGHSDVVDNGTLFLGILKNWKEESDRKIMQSQIVSFYFKLFKNFKDDQSIQKSVETIKEDMNVKFFNSNKKKRDDFEKLTNYSVTDLNVQRKAIHELIQVMAELSPAAKTGKRKRSQMLFRG

SEQ ID NO: 48 - protein, 115 aa, Artificial Sequence
  Synthetic Construct
QVQLVESGGGVVQPGRSLRLDCKASGITFSNSGMHWVRQAPGKGLEWVAVIWYDGSKRYYADSVKGRFTISRDNSKNTLFLQMNSLRAEDTAVYYCATNDDYWGQGTLVTVSSAS

SEQ ID NO: 49 - protein, 106 aa, Artificial Sequence
  Synthetic Construct
EIVLTQSPATLSLSPGERATLSCRASQSVSSYLAWYQQKPGQAPRLLIYDASNRATGIPARFSGSGSGTDFTLTISSLEPEDFAVYYCQQSSNWPRTFGQGTKVEI

SEQ ID NO: 50 - protein, 214 aa, Artificial Sequence
  Synthetic Construct
EIVLTQSPATLSLSPGERATLSCRASQSVSSYLAWYQQKPGQAPRLLIYDASNRATGIPARFSGSGSGTDFTLTISSLEPEDFAVYYCQQSSNWPRTFGQGTKVEIKRTVAAPSVFIFPPSDEQLKSGTASVVCLLNNFYPREAKVQWKVDNALQSGNSQESVTEQDSKDSTYSLSSTLTLSKADYEKHKVYACEVTHQGLSSPVTKSFNRGEC

SEQ ID NO: 51 - protein, 443 aa, Artificial Sequence
  Synthetic Construct
QVQLVESGGGVVQPGRSLRLDCKASGITFSNSGMHWVRQAPGKGLEWVAVIWYDGSKRYYADSVKGRFTISRDNSKNTLFLQMNSLRAEDTAVYYCATNDDYWGQGTLVTVSSASTKGPSVFPLAPSSKSTSGGTAALGCLVKDYFPEPVTVSWNSGALTSGVHTFPAVLQSSGLYSLSSVVTVPSSSLGTQTYICNVNHKPSNTKVDKKVEPKSCDKTHTCPPCPAPEKKGGPSVFLFPPKPKDTLMISRTPEVTCVVVDVSHEDPEVKFNWYVDGVEVHNAKTKPREEQYNSTYRVVSVLTVLHQDWLNGKEYKCKVSNKALPAPIEKTISKAKGQPREPQVYVLPPSREEMTKNQVSLLCLVKGFYPSDIAVEWESNGQPENRYMTWPPVLDSDGSFFLYSKLTVDKSRWQQGNVFSCSVMHEALHNHYTQKSLSLSPGK

SEQ ID NO: 52 - protein, 160 aa, Homo sapiens
SPGQGTQSENSCTHFPGNLPNMLRDLRDAFSRVKTFFQMKDQLDNLLLKESLLEDFKGYLGCQALSEMIQFYLEEVMPQAENQDPDIKAHVNSLGENLKTLRLRLRRCHRFLPCENKSKAVEQVKNAFNKLQEKGIYKAMSEFDIFINYIEAYMTMKIRN

SEQ ID NO: 53 - protein, 160 aa, Artificial Sequence
  Synthetic Construct
SPGQGTQSENSCTHFPGNLPNMLADLRDAFSRVKTFFQMKDQLDNLLLKESLLEDFKGYLGCQALSEMIQFYLEEVMPQAENQDPDIKAHVNSLGENLKTLRLRLRRCHRFLPCENKSKAVEQVKNAFNKLQEKGIYKAMSEFDIFINYIEAYMTMKIRN

SEQ ID NO: 54 - protein, 160 aa, Artificial Sequence
  Synthetic Construct
SPGQGTQSENSCTHFPGNLPNMLRAARDAFSRVKTFFQMKDQLDNLLLKESLLEDFKGYLGCQALSEMIQFYLEEVMPQAENQDPDIKAHVNSLGENLKTLRLRLRRCHRFLPCENKSKAVEQVKNAFNKLQEKGIYKAMSEFDIFINYIEAYMTMKIRN

SEQ ID NO: 55 - protein, 160 aa, Artificial Sequence
  Synthetic Construct
SPGQGTQSENSCTHFPGNLPNMLRDLADAFSRVKTFFQMKDQLDNLLLKESLLEDFKGYLGCQALSEMIQFYLEEVMPQAENQDPDIKAHVNSLGENLKTLRLRLRRCHRFLPCENKSKAVEQVKNAFNKLQEKGIYKAMSEFDIFINYIEAYMTMKIRN

SEQ ID NO: 56 - protein, 160 aa, Artificial Sequence
  Synthetic Construct
SPGQGTQSENSCTHFPGNLPNMLRDLRASFSRVKTFFQMKDQLDNLLLKESLLEDFKGYLGCQALSEMIQFYLEEVMPQAENQDPDIKAHVNSLGENLKTLRLRLRRCHRFLPCENKSKAVEQVKNAFNKLQEKGIYKAMSEFDIFINYIEAYMTMKIRN

SEQ ID NO: 57 - protein, 160 aa, Artificial Sequence
  Synthetic Construct
SPGQGTQSENSCTHFPGNLPNMLRDLRDAAARVKTFFQMKDQLDNLLLKESLLEDFKGYLGCQALSEMIQFYLEEVMPQAENQDPDIKAHVNSLGENLKTLRLRLRRCHRFLPCENKSKAVEQVKNAFNKLQEKGIYKAMSEFDIFINYIEAYMTMKIRN

SEQ ID NO: 58 - protein, 160 aa, Artificial Sequence
  Synthetic Construct
SPGQGTQSENSCTHFPGNLPNMLRDLRDAFSAVKTFFQMKDQLDNLLLKESLLEDFKGYLGCQALSEMIQFYLEEVMPQAENQDPDIKAHVNSLGENLKTLRLRLRRCHRFLPCENKSKAVEQVKNAFNKLQEKGIYKAMSEFDIFINYIEAYMTMKIRN

SEQ ID NO: 59 - protein, 341 aa, Artificial Sequence
  Synthetic Construct
SPGQGTQSENSCTHFPGNLPNMLRDLRDAFSRVKTFFQMKDQLDNLLLKESLLEDFKGYLGCQALSEMIQFYLEEVMPQAENQDPDIKAHVNSLGENLKTLRLRLRRCHRFLPCENKSKAVEQVKNAFNKLQEKGIYKAMSEFDIFINYIEAYMTMKIRNFEGGGSGGGGSGGGGSGGGGSSPGQGTQSENSCTHFPGNLPNMLRDLRDAFSRVKTFFQMKDQLDNLLLKESLLEDFKGYLGCQALSEMIQFYLEEVMPQAENQDPDIKAHVNSLGENLKTLRLRLRRCHRFLPCENKSKAVEQVKNAFNKLQEKGIYKAMSEFDIFINYIEAYMTMKIRN

SEQ ID NO: 60 - protein, 341 aa, Artificial Sequence
  Synthetic Construct
SPGQGTQSENSCTHFPGNLPNMLRDLADAFSRVKTFFQMKDQLDNLLLKESLLEDFKGYLGCQALSEMIQFYLEEVMPQAENQDPDIKAHVNSLGENLKTLRLRLRRCHRFLPCENKSKAVEQVKNAFNKLQEKGIYKAMSEFDIFINYIEAYMTMKIRNFEGGGSGGGGSGGGGSGGGGSSPGQGTQSENSCTHFPGNLPNMLRDLADAFSRVKTFFQMKDQLDNLLLKESLLEDFKGYLGCQALSEMIQFYLEEVMPQAENQDPDIKAHVNSLGENLKTLRLRLRRCHRFLPCENKSKAVEQVKNAFNKLQEKGIYKAMSEFDIFINYIEAYMTMKIRN

SEQ ID NO: 61 - protein, 197 aa, Homo sapiens
RNLPVATPDPGMFPCLHHSQNLLRAVSNMLQKARQTLEFYPCTSEEIDHEDITKDKTSTVEACLPLELTKNESCLNSRETSFITNGSCLASRKTSFMMALCLSSIYEDLKMYQVEFKTMNAKLLMDPKRQIFLDQNMLAVIDELMQALNFNSETVPQKSSLEEPDFYKTKIKLCILLHAFRIRAVTIDRVMSYLNAS

SEQ ID NO: 62 - protein, 306 aa, Homo sapiens
IWELKKDVYVVELDWYPDAPGEMVVLTCDTPEEDGITWTLDQSSEVLGSGKTLTIQVKEFGDAGQYTCHKGGEVLSHSLLLLHKKEDGIWSTDILKDQKEPKNKTFLRCEAKNYSGRFTCWWLTTISTDLTFSVKSSRGSSDPQGVTCGAATLSAERVRGDNKEYEYSVECQEDSACPAAEESLPIEVMVDAVHKLKYENYTSSFFIRDIIKPDPPKNLQLKPLKNSRQVEVSWEYPDTWSTPHSYFSLTFCVQVQGKSKREKKDRVFTDKTSATVICRKNASISVRAQDRYYSSSWSEWASVPCS

SEQ ID NO: 63 - protein, 306 aa, Artificial Sequence
  Synthetic Construct
IWELKKDVYVVELDWYPDAPGEMVVLTCDTPEEDGITWTLDQSSEVLGSGKTLTIQVKAAGDAGQYTCHKGGEVLSHSLLLLHKKEDGIWSTDILKDQKEPKNKTFLRCEAKNYSGRFTCWWLTTISTDLTFSVKSSRGSSDPQGVTCGAATLSAERVRGDNKEYEYSVECQEDSACPAAEESLPIEVMVDAVHKLKYENYTSSFFIRDIIKPDPPKNLQLKPLKNSRQVEVSWEYPDTWSTPHSYFSLTFCVQVQGKSKREKKDRVFTDKTSATVICRKNASISVRAQDRYYSSSWSEWASVPCS

SEQ ID NO: 64 - protein, 306 aa, Artificial Sequence
  Synthetic Construct
IWELKKDVYVVELDWYPDAPGEMVVLTCDTPEEDGITWTLDQSSEVLGSGKTLTIQVKAFGDAGQYTCHKGGEVLSHSLLLLHKKEDGIWSTDILKDQKEPKNKTFLRCEAKNYSGRFTCWWLTTISTDLTFSVKSSRGSSDPQGVTCGAATLSAERVRGDNKEYEYSVECQEDSACPAAEESLPIEVMVDAVHKLKYENYTSSFFIRDIIKPDPPKNLQLKPLKNSRQVEVSWEYPDTWSTPHSYFSLTFCVQVQGKSKREKKDRVFTDKTSATVICRKNASISVRAQDRYYSSSWSEWASVPCS

SEQ ID NO: 65 - protein, 306 aa, Artificial Sequence
  Synthetic Construct
IWELKKDVYVVELDWYPDAPGEMVVLTCDTPEEDGITWTLDQSSEVLGSGKTLTIQVKEAGDAGQYTCHKGGEVLSHSLLLLHKKEDGIWSTDILKDQKEPKNKTFLRCEAKNYSGRFTCWWLTTISTDLTFSVKSSRGSSDPQGVTCGAATLSAERVRGDNKEYEYSVECQEDSACPAAEESLPIEVMVDAVHKLKYENYTSSFFIRDIIKPDPPKNLQLKPLKNSRQVEVSWEYPDTWSTPHSYFSLTFCVQVQGKSKREKKDRVFTDKTSATVICRKNASISVRAQDRYYSSSWSEWASVPCS

SEQ ID NO: 66 - protein, 306 aa, Artificial Sequence
  Synthetic Construct
IWELKKDVYVVELDWYPDAPGEMVVLTCDTPEEDGITWTLDQSSEVLGSGKTLTIQVKEFGDAAQYTCHKGGEVLSHSLLLLHKKEDGIWSTDILKDQKEPKNKTFLRCEAKNYSGRFTCWWLTTISTDLTFSVKSSRGSSDPQGVTCGAATLSAERVRGDNKEYEYSVECQEDSACPAAEESLPIEVMVDAVHKLKYENYTSSFFIRDIIKPDPPKNLQLKPLKNSRQVEVSWEYPDTWSTPHSYFSLTFCVQVQGKSKREKKDRVFTDKTSATVICRKNASISVRAQDRYYSSSWSEWASVPCS

SEQ ID NO: 67 - protein, 524 aa, Artificial Sequence
  Synthetic Construct
IWELKKDVYVVELDWYPDAPGEMVVLTCDTPEEDGITWTLDQSSEVLGSGKTLTIQVKEFGDAGQYTCHKGGEVLSHSLLLLHKKEDGIWSTDILKDQKEPKNKTFLRCEAKNYSGRFTCWWLTTISTDLTFSVKSSRGSSDPQGVTCGAATLSAERVRGDNKEYEYSVECQEDSACPAAEESLPIEVMVDAVHKLKYENYTSSFFIRDIIKPDPPKNLQLKPLKNSRQVEVSWEYPDTWSTPHSYFSLTFCVQVQGKSKREKKDRVFTDKTSATVICRKNASISVRAQDRYYSSSWSEWASVPCSGGGGSGGGGSGGGGSGGGGSGRNLPVATPDPGMFPCLHHSQNLLRAVSNMLQKARQTLEFYPCTSEEIDHEDITKDKTSTVEACLPLELTKNESCLNSRETSFITNGSCLASRKTSFMMALCLSSIYEDLKMYQVEFKTMNAKLLMDPKRQIFLDQNMLAVIDELMQALNFNSETVPQKSSLEEPDFYKTKIKLCILLHAFRIRAVTIDRVMSYLNAS

SEQ ID NO: 68 - protein, 524 aa, Artificial Sequence
  Synthetic Construct
IWELKKDVYVVELDWYPDAPGEMVVLTCDTPEEDGITWTLDQSSEVLGSGKTLTIQVKAAGDAGQYTCHKGGEVLSHSLLLLHKKEDGIWSTDILKDQKEPKNKTFLRCEAKNYSGRFTCWWLTTISTDLTFSVKSSRGSSDPQGVTCGAATLSAERVRGDNKEYEYSVECQEDSACPAAEESLPIEVMVDAVHKLKYENYTSSFFIRDIIKPDPPKNLQLKPLKNSRQVEVSWEYPDTWSTPHSYFSLTFCVQVQGKSKREKKDRVFTDKTSATVICRKNASISVRAQDRYYSSSWSEWASVPCSGGGGSGGGGSGGGGSGGGGSGRNLPVATPDPGMFPCLHHSQNLLRAVSNMLQKARQTLEFYPCTSEEIDHEDITKDKTSTVEACLPLELTKNESCLNSRETSFITNGSCLASRKTSFMMALCLSSIYEDLKMYQVEFKTMNAKLLMDPKRQIFLDQNMLAVIDELMQALNFNSETVPQKSSLEEPDFYKTKIKLCILLHAFRIRAVTIDRVMSYLNAS

SEQ ID NO: 69 - protein, 524 aa, Artificial Sequence
  Synthetic Construct
IWELKKDVYVVELDWYPDAPGEMVVLTCDTPEEDGITWTLDQSSEVLGSGKTLTIQVKAFGDAGQYTCHKGGEVLSHSLLLLHKKEDGIWSTDILKDQKEPKNKTFLRCEAKNYSGRFTCWWLTTISTDLTFSVKSSRGSSDPQGVTCGAATLSAERVRGDNKEYEYSVECQEDSACPAAEESLPIEVMVDAVHKLKYENYTSSFFIRDIIKPDPPKNLQLKPLKNSRQVEVSWEYPDTWSTPHSYFSLTFCVQVQGKSKREKKDRVFTDKTSATVICRKNASISVRAQDRYYSSSWSEWASVPCSGGGGSGGGGSGGGGSGGGGSGRNLPVATPDPGMFPCLHHSQNLLRAVSNMLQKARQTLEFYPCTSEEIDHEDITKDKTSTVEACLPLELTKNESCLNSRETSFITNGSCLASRKTSFMMALCLSSIYEDLKMYQVEFKTMNAKLLMDPKRQIFLDQNMLAVIDELMQALNFNSETVPQKSSLEEPDFYKTKIKLCILLHAFRIRAVTIDRVMSYLNAS

SEQ ID NO: 70 - protein, 524 aa, Artificial Sequence
  Synthetic Construct
IWELKKDVYVVELDWYPDAPGEMVVLTCDTPEEDGITWTLDQSSEVLGSGKTLTIQVKEFGDAAQYTCHKGGEVLSHSLLLLHKKEDGIWSTDILKDQKEPKNKTFLRCEAKNYSGRFTCWWLTTISTDLTFSVKSSRGSSDPQGVTCGAATLSAERVRGDNKEYEYSVECQEDSACPAAEESLPIEVMVDAVHKLKYENYTSSFFIRDIIKPDPPKNLQLKPLKNSRQVEVSWEYPDTWSTPHSYFSLTFCVQVQGKSKREKKDRVFTDKTSATVICRKNASISVRAQDRYYSSSWSEWASVPCSGGGGSGGGGSGGGGSGGGGSGRNLPVATPDPGMFPCLHHSQNLLRAVSNMLQKARQTLEFYPCTSEEIDHEDITKDKTSTVEACLPLELTKNESCLNSRETSFITNGSCLASRKTSFMMALCLSSIYEDLKMYQVEFKTMNAKLLMDPKRQIFLDQNMLAVIDELMQALNFNSETVPQKSSLEEPDFYKTKIKLCILLHAFRIRAVTIDRVMSYLNAS

SEQ ID NO: 71 - protein, 524 aa, Artificial Sequence
  Synthetic Construct
IWELKKDVYVVELDWYPDAPGEMVVLTCDTPEEDGITWTLDQSSEVLGSGKTLTIQVKEAGDAGQYTCHKGGEVLSHSLLLLHKKEDGIWSTDILKDQKEPKNKTFLRCEAKNYSGRFTCWWLTTISTDLTFSVKSSRGSSDPQGVTCGAATLSAERVRGDNKEYEYSVECQEDSACPAAEESLPIEVMVDAVHKLKYENYTSSFFIRDIIKPDPPKNLQLKPLKNSRQVEVSWEYPDTWSTPHSYFSLTFCVQVQGKSKREKKDRVFTDKTSATVICRKNASISVRAQDRYYSSSWSEWASVPCSGGGGSGGGGSGGGGSGGGGSGRNLPVATPDPGMFPCLHHSQNLLRAVSNMLQKARQTLEFYPCTSEEIDHEDITKDKTSTVEACLPLELTKNESCLNSRETSFITNGSCLASRKTSFMMALCLSSIYEDLKMYQVEFKTMNAKLLMDPKRQIFLDQNMLAVIDELMQALNFNSETVPQKSSLEEPDFYKTKIKLCILLHAFRIRAVTIDRVMSYLNAS

SEQ ID NO: 72 - protein, 524 aa, Artificial Sequence
  Synthetic Construct
MWELEKDVYVVEVDWTPDAPGETVNLTCDTPEEDDITWTSDQRHGVIGSGKTLTITVKAALDAGQYTCHKGGETLSHSHLLLHKKENGIWSTEILKNFKNKTFLKCEAPNYSGRFTCSWLVQRNMDLKFNIKSSSSSPDSRAVTCGMASLSAEKVTLDQRDYEKYSVSCQEDVTCPTAEETLPIELALEARQQNKYENYSTSFFIRDIIKPDPPKNLQMKPLKNSQVEVSWEYPDSWSTPHSYFSLKFFVRIQRKKEKMKETEEGCNQKGAFLVEKTSTEVQCKGGNVCVQAQDRYYNSSCSKWACVPCRVRSGGPGGGGSGGGSGGGGSGRVIPVSGPARCLSQSRNLLKTTDDMVKTAREKLKHYSCTAEDIDHEDITRDQTSTLKTCLPLELHKNESCLATRETSSTTRGSCLPPQKTSLMMTLCLGSIYEDLKMYQTEFQAINAALQNHNHQQIILDKGMLVAIDELMQSLNHNGETLRQKPPVGEADPYRVKMKLCILLHAFSTRVVTINRVMGYLSSA

SEQ ID NO: 73 - protein, 170 aa, Homo sapiens
RAVPGGSSPAWTQCQQLSQKLCTLAWSAHPLVGHMDLREEGDEETTNDVPHIQCGDGCDPQGLRDNSQFCLQRIHQGLIFYEKLLGSDIFTGEPSLLPDSPVGQLHASLLGLSQLLQPEGHHWETQQIPSLSPSQPWQRLLLRFKILRSLQAFVAVAARVFAHGAATLSP

SEQ ID NO: 74 - protein, 497 aa, Artificial Sequence
  Synthetic Construct
IWELKKDVYVVELDWYPDAPGEMVVLTCDTPEEDGITWTLDQSSEVLGSGKTLTIQVKEFGDAGQYTCHKGGEVLSHSLLLLHKKEDGIWSTDILKDQKEPKNKTFLRCEAKNYSGRFTCWWLTTISTDLTFSVKSSRGSSDPQGVTCGAATLSAERVRGDNKEYEYSVECQEDSACPAAEESLPIEVMVDAVHKLKYENYTSSFFIRDIIKPDPPKNLQLKPLKNSRQVEVSWEYPDTWSTPHSYFSLTFCVQVQGKSKREKKDRVFTDKTSATVICRKNASISVRAQDRYYSSSWSEWASVPCSGGGGSGGGGSGGGGSGGGGSGRAVPGGSSPAWTQCQQLSQKLCTLAWSAHPLVGHMDLREEGDEETTNDVPHIQCGDGCDPQGLRDNSQFCLQRIHQGLIFYEKLLGSDIFTGEPSLLPDSPVGQLHASLLGLSQLLQPEGHHWETQQIPSLSPSQPWQRLLLRFKILRSLQAFVAVAARVFAHGAATLSP

SEQ ID NO: 75 - protein, 497 aa, Artificial Sequence
  Synthetic Construct
IWELKKDVYVVELDWYPDAPGEMVVLTCDTPEEDGITWTLDQSSEVLGSGKTLTIQVKAAGDAGQYTCHKGGEVLSHSLLLLHKKEDGIWSTDILKDQKEPKNKTFLRCEAKNYSGRFTCWWLTTISTDLTFSVKSSRGSSDPQGVTCGAATLSAERVRGDNKEYEYSVECQEDSACPAAEESLPIEVMVDAVHKLKYENYTSSFFIRDIIKPDPPKNLQLKPLKNSRQVEVSWEYPDTWSTPHSYFSLTFCVQVQGKSKREKKDRVFTDKTSATVICRKNASISVRAQDRYYSSSWSEWASVPCSGGGGSGGGGSGGGGSGGGGSGRAVPGGSSPAWTQCQQLSQKLCTLAWSAHPLVGHMDLREEGDEETTNDVPHIQCGDGCDPQGLRDNSQFCLQRIHQGLIFYEKLLGSDIFTGEPSLLPDSPVGQLHASLLGLSQLLQPEGHHWETQQIPSLSPSQPWQRLLLRFKILRSLQAFVAVAARVFAHGAATLSP

SEQ ID NO: 76 - protein, 23 aa, Artificial Sequence
  Synthetic Construct
EPKSCDKTHTCPPCPAPELLGGP

SEQ ID NO: 77 - protein, 23 aa, Artificial Sequence
  Synthetic Construct
EPKSCDKTHTCPPCPAPEKKGGP

SEQ ID NO: 78 - protein, 23 aa, Artificial Sequence
  Synthetic Construct
EPKSCDKTHTCPPCPAPEDEGGP

SEQ ID NO: 79 - protein, 25 aa, Artificial Sequence
  Synthetic Construct
EPKSCDKDKTHTCPPCPAPELLGGP

SEQ ID NO: 80 - protein, 25 aa, Artificial Sequence
  Synthetic Construct
EPKSCDKDKTHTCPPCPAPEKKGGP

SEQ ID NO: 81 - protein, 25 aa, Artificial Sequence
  Synthetic Construct
EPKSCDKDKTHTCPPCPAPEDEGGP

SEQ ID NO: 82 - protein, 19 aa, Artificial Sequence
  Synthetic Construct
ERKCCVECPPCPAPPVAGP

SEQ ID NO: 83 - protein, 20 aa, Artificial Sequence
  Synthetic Construct
ESKYGPPCPSCPAPEFLGGP

SEQ ID NO: 84 - protein, 7 aa, Artificial Sequence
  Synthetic Construct
EPKSCDK

SEQ ID NO: 85 - protein, 5 aa, Artificial Sequence
  Synthetic Construct
EPKSC

SEQ ID NO: 86 - protein, 18 aa, Artificial Sequence
  Synthetic Construct
DKTHTCPPCPAPELLGGP

SEQ ID NO: 87 - protein, 18 aa, Artificial Sequence
  Synthetic Construct
DKTHTCPPCPAPEKKGGP

SEQ ID NO: 88 - protein, 18 aa, Artificial Sequence
  Synthetic Construct
DKTHTCPPCPAPEDEGGP

SEQ ID NO: 89 - protein, 5 aa, Artificial Sequence
  Synthetic Construct
DKTHT

SEQ ID NO: 90 - protein, 8 aa, Artificial Sequence
  Synthetic Construct
EPKSCDKP

SEQ ID NO: 91 - protein, 26 aa, Artificial Sequence
  Synthetic Construct
EPKSCDKPDKTHTCPPCPAPELLGGP

SEQ ID NO: 92 - protein, 26 aa, Artificial Sequence
  Synthetic Construct
EPKSCDKPDKTHTCPPCPAPEKKGGP

SEQ ID NO: 93 - protein, 26 aa, Artificial Sequence
  Synthetic Construct
EPKSCDKPDKTHTCPPCPAPEDEGGP

SEQ ID NO: 94 - protein, 20 aa, Artificial Sequence
  Synthetic Construct
ESKYGPPCPPCPAPEFLGGP

SEQ ID NO: 95 - protein, 24 aa, Artificial Sequence
  Synthetic Construct
EPPKSCDKTHTCPPCPAPELLGGP

SEQ ID NO: 96 - protein, 209 aa, Homo sapiens
SVFLFPPKPKDTLMISRTPEVTCVVVDVSHEDPEVKFNWYVDGVEVHNAKTKPREEQYNSTYRVVSVLTVLHQDWLNGKEYKCKVSNKALPAPIEKTISKAKGQPREPQVYTLPPSRDELTKNQVSLTCLVKGFYPSDIAVEWESNGQPENNYKTTPPVLDSDGSFFLYSKLTVDKSRWQQGNVFSCSVMHEALHNHYTQKSLSLSPGK

SEQ ID NO: 97 - protein, 209 aa, Artificial Sequence
  Synthetic Construct
SVFLFPPKPKDTLMISRTPEVTCVVVDVSHEDPEVKFNWYVDGVEVHNAKTKPREEQYNSTYRVVSVLTVLHQDWLNGKEYKCKVSNKALPAPIEKTISKAKGQPREPQVYVYPPSREEMTKNQVSLTCLVKGFYPSDIAVEWESNGQPENNYKTTPPVLDEDGSFALVSKLTVDKSRWQQGNVFSCSVMHEALHNHYTQKSLSLSPGK

SEQ ID NO: 98 - protein, 209 aa, Artificial Sequence
  Synthetic Construct
SVFLFPPKPKDTLMISRTPEVTCVVVDVSHEDPEVKFNWYVDGVEVHNAKTKPREEQYNSTYRVVSVLTVLHQDWLNGKEYKCKVSNKALPAPIEKTISKAKGQPREPQVYVLPPSREEMTKNQVSLLCLVKGFYPSDIAVEWESNGQPENRYMTWPPVLDSDGSFFLYSKLTVDKSRWQQGNVFSCSVMHEALHNHYTQKSLSLSPGK

SEQ ID NO: 99 - protein, 209 aa, Homo sapiens
SVFLFPPKPKDTLMISRTPEVTCVVVDVSQEDPEVQFNWYVDGVEVHNAKTKPREEQFNSTYRVVSVLTVLHQDWLNGKEYKCKVSNKGLPSSIEKTISKAKGQPREPQVYTLPPSQEEMTKNQVSLTCLVKGFYPSDIAVEWESNGQPENNYKTTPPVLDSDGSFFLYSRLTVDKSRWQEGNVFSCSVMHEALHNHYTQKSLSLSLGK

SEQ ID NO: 100 - protein, 209 aa, Artificial Sequence
  Synthetic Construct
SVFLFPPKPKDTLMISRTPEVTCVVVDVSHEDPEVKFNWYVDGVEVHNAKTKPREEQYASTYRVVSVLTVLHQDWLNGKEYKCKVSNKALPAPIEKTISKAKGQPREPQVYTLPPSRDELTKNQVSLTCLVKGFYPSDIAVEWESNGQPENNYKTTPPVLDSDGSFFLYSKLTVDKSRWQQGNVFSCSVMHEALHNHYTQKSLSLSPGK

SEQ ID NO: 101 - protein, 209 aa, Artificial Sequence
  Synthetic Construct
SVFLFPPKPKDTLMISRTPEVTCVVVDVSHEDPEVKFNWYVDGVEVHNAKTKPREEQYASTYRVVSVLTVLHQDWLNGKEYKCKVSNKALPAPIEKTISKAKGQPREPQVYTLPPSREEMTKNQVSLTCLVKGFYPSDIAVEWESNGQPENNYKTTPPVLDSDGSFFLYSKLTVDKSRWQQGNVFSCSVMHEALHNHYTQKSLSLSPGK

SEQ ID NO: 102 - protein, 209 aa, Artificial Sequence
  Synthetic Construct
SVFLFPPKPKDTLMISRTPEVTCVVVDVSHEDPEVKFNWYVDGVEVHNAKTKPREEQYNSTYRVVSVLTVLHQDWLNGKEYKCKVSNKALPAPIEKTISKAKGQPREPQVYTLPPSREEMTKNQVSLTCLVKGFYPSDIAVEWESNGQPENNYKTTPPVLDSDGSFFLYSKLTVDKSRWQQGNVFSCSVMHEALHNHYTQKSLSLSPGK

SEQ ID NO: 103 - protein, 443 aa, Artificial Sequence
  Synthetic Construct
QVQLVESGGGVVQPGRSLRLDCKASGITFSNSGMHWVRQAPGKGLEWVAVIWYDGSKRYYADSVKGRFTISRDNSKNTLFLQMNSLRAEDTAVYYCATNDDYWGQGTLVTVSSASTKGPSVFPLAPSSKSTSGGTAALGCLVKDYFPEPVTVSWNSGALTSGVHTFPAVLQSSGLYSLSSVVTVPSSSLGTQTYICNVNHKPSNTKVDKKVEPKSCDKTHTCPPCPAPELLGGPSVFLFPPKPKDTLMISRTPEVTCVVVDVSHEDPEVKFNWYVDGVEVHNAKTKPREEQYASTYRVVSVLTVLHQDWLNGKEYKCKVSNKALPAPIEKTISKAKGQPREPQVYTLPPSRDELTKNQVSLTCLVKGFYPSDIAVEWESNGQPENNYKTTPPVLDSDGSFFLYSKLTVDKSRWQQGNVFSCSVMHEALHNHYTQKSLSLSPGK

SEQ ID NO: 104 - protein, 440 aa, Artificial Sequence
  Synthetic Construct
QVQLVESGGGVVQPGRSLRLDCKASGITFSNSGMHWVRQAPGKGLEWVAVIWYDGSKRYYADSVKGRFTISRDNSKNTLFLQMNSLRAEDTAVYYCATNDDYWGQGTLVTVSSASTKGPSVFPLAPCSRSTSESTAALGCLVKDYFPEPVTVSWNSGALTSGVHTFPAVLQSSGLYSLSSVVTVPSSSLGTKTYTCNVDHKPSNTKVDKRVESKYGPPCPPCPAPEFLGGPSVFLFPPKPKDTLMISRTPEVTCVVVDVSQEDPEVQFNWYVDGVEVHNAKTKPREEQFNSTYRVVSVLTVLHQDWLNGKEYKCKVSNKGLPSSIEKTISKAKGQPREPQVYTLPPSQEEMTKNQVSLTCLVKGFYPSDIAVEWESNGQPENNYKTTPPVLDSDGSFFLYSRLTVDKSRWQEGNVFSCSVMHEALHNHYTQKSLSLSLGK

SEQ ID NO: 105 - protein, 273 aa, Homo sapiens
MIFLLLMLSLELQLHQIAALFTVTVPKELYIIEHGSNVTLECNFDTGSHVNLGAITASLQKVENDTSPHRERATLLEEQLPLGKASFHIPQVQVRDEGQYQCIIIYGVAWDYKYLTLKVKASYRKINTHILKVPETDEVELTCQATGYPLAEVSWPNVSVPANTSHSRTPEGLYQVTSVLRLKPPPGRNFSCVFWNTHVRELTLASIDLQSQMEPRTHPTWLLHIFIPFCIIAFIFIATVIALRKQLCQKLYSSKDTTKRPVTTTKREVNSAI

SEQ ID NO: 106 - protein, 201 aa, Homo sapiens
LFTVTVPKELYIIEHGSNVTLECNFDTGSHVNLGAITASLQKVENDTSPHRERATLLEEQLPLGKASFHIPQVQVRDEGQYQCIIIYGVAWDYKYLTLKVKASYRKINTHILKVPETDEVELTCQATGYPLAEVSWPNVSVPANTSHSRTPEGLYQVTSVLRLKPPPGRNFSCVFWNTHVRELTLASIDLQSQMEPRTHPT

SEQ ID NO: 107 - protein, 201 aa, Homo sapiens
LFTVTVPKELYIIEHGSNVTLECNFDTGSHVNLGAIVASLQKVENDTSPHRERATLLEEQLPLGKASFHIPQVQVRDEGQYQCIIIYGVAWDYKYLTLKVKASYRKINTHILKVPETDEVELTCQATGYPLAEVSWPNVSVPANTSHSRTPEGLYQVTSVLRLKPPPGRNFSCVFWNTHVRELTLASIDLQSQMEPRTHPT

SEQ ID NO: 108 - protein, 201 aa, Homo sapiens
LFTVTVPKELYIIEHGSNVTLECNFDTGSHVNLGAITAVLQKVENDTSPHRERATLLEEQLPLGKASFHIPQVQVRDEGQYQCIIIYGVAWDYKYLTLKVKASYRKINTHILKVPETDEVELTCQATGYPLAEVSWPNVSVPANTSHSRTPEGLYQVTSVLRLKPPPGRNFSCVFWNTHVRELTLASIDLQSQMEPRTHPT

SEQ ID NO: 109 - protein, 201 aa, Homo sapiens
LFTVTVPKELYIIEHGSNVTLECNFDTGSHVNLGAITASLLKVENDTSPHRERATLLEEQLPLGKASFHIPQVQVRDEGQYQCIIIYGVAWDYKYLTLKVKASYRKINTHILKVPETDEVELTCQATGYPLAEVSWPNVSVPANTSHSRTPEGLYQVTSVLRLKPPPGRNFSCVFWNTHVRELTLASIDLQSQMEPRTHPT

SEQ ID NO: 110 - protein, 201 aa, Homo sapiens
LFTVTVPKELYIIEHGSNVTLECNFDTGSHVNLGAIVAVLLKVENDTSPHRERATLLEEQLPLGKASFHIPQVQVRDEGQYQCIIIYGVAWDYKYLTLKVKASYRKINTHILKVPETDEVELTCQATGYPLAEVSWPNVSVPANTSHSRTPEGLYQVTSVLRLKPPPGRNFSCVFWNTHVRELTLASIDLQSQMEPRTHPT

SEQ ID NO: 111 - protein, 428 aa, Homo sapiens
LFTVTVPKELYIIEHGSNVTLECNFDTGSHVNLGAITASLQKVENDTSPHRERATLLEEQLPLGKASFHIPQVQVRDEGQYQCIIIYGVAWDYKYLTLKVKASYRKINTHILKVPETDEVELTCQATGYPLAEVSWPNVSVPANTSHSRTPEGLYQVTSVLRLKPPPGRNFSCVFWNTHVRELTLASIDLQSQMEPRTHPTDKTHTCPPCPAPELLGGPSVFLFPPKPKDTLMISRTPEVTCVVVDVSHEDPEVKFNWYVDGVEVHNAKTKPREEQYASTYRVVSVLTVLHQDWLNGKEYKCKVSNKALPAPIEKTISKAKGQPREPQVYTLPPSRDELTKNQVSLTCLVKGFYPSDIAVEWESNGQPENNYKTTPPVLDSDGSFFLYSKLTVDKSRWQQGNVFSCSVMHEALHNHYTQKSLSLSPGK

SEQ ID NO: 112 - protein, 428 aa, Homo sapiens
LFTVTVPKELYIIEHGSNVTLECNFDTGSHVNLGAITASLQKVENDTSPHRERATLLEEQLPLGKASFHIPQVQVRDEGQYQCIIIYGVAWDYKYLTLKVKASYRKINTHILKVPETDEVELTCQATGYPLAEVSWPNVSVPANTSHSRTPEGLYQVTSVLRLKPPPGRNFSCVFWNTHVRELTLASIDLQSQMEPRTHPTDKTHTCPPCPAPEKKGGPSVFLFPPKPKDTLMISRTPEVTCVVVDVSHEDPEVKFNWYVDGVEVHNAKTKPREEQYNSTYRVVSVLTVLHQDWLNGKEYKCKVSNKALPAPIEKTISKAKGQPREPQVYVLPPSREEMTKNQVSLLCLVKGFYPSDIAVEWESNGQPENRYMTWPPVLDSDGSFFLYSKLTVDKSRWQQGNVFSCSVMHEALHNHYTQKSLSLSPGK

SEQ ID NO: 113 - protein, 433 aa, Homo sapiens
LFTVTVPKELYIIEHGSNVTLECNFDTGSHVNLGAITASLQKVENDTSPHRERATLLEEQLPLGKASFHIPQVQVRDEGQYQCIIIYGVAWDYKYLTLKVKASYRKINTHILKVPETDEVELTCQATGYPLAEVSWPNVSVPANTSHSRTPEGLYQVTSVLRLKPPPGRNFSCVFWNTHVRELTLASIDLQSQMEPRTHPTGGGGSDKTHTCPPCPAPEKKGGPSVFLFPPKPKDTLMISRTPEVTCVVVDVSHEDPEVKFNWYVDGVEVHNAKTKPREEQYNSTYRVVSVLTVLHQDWLNGKEYKCKVSNKALPAPIEKTISKAKGQPREPQVYVLPPSREEMTKNQVSLLCLVKGFYPSDIAVEWESNGQPENRYMTWPPVLDSDGSFFLYSKLTVDKSRWQQGNVFSCSVMHEALHNHYTQKSLSLSPGK

SEQ ID NO: 114 - protein, 435 aa, Homo sapiens
LFTVTVPKELYIIEHGSNVTLECNFDTGSHVNLGAITASLQKVENDTSPHRERATLLEEQLPLGKASFHIPQVQVRDEGQYQCIIIYGVAWDYKYLTLKVKASYRKINTHILKVPETDEVELTCQATGYPLAEVSWPNVSVPANTSHSRTPEGLYQVTSVLRLKPPPGRNFSCVFWNTHVRELTLASIDLQSQMEPRTHPTGSGGGGGDKTHTCPPCPAPEKKGGPSVFLFPPKPKDTLMISRTPEVTCVVVDVSHEDPEVKFNWYVDGVEVHNAKTKPREEQYNSTYRVVSVLTVLHQDWLNGKEYKCKVSNKALPAPIEKTISKAKGQPREPQVYVLPPSREEMTKNQVSLLCLVKGFYPSDIAVEWESNGQPENRYMTWPPVLDSDGSFFLYSKLTVDKSRWQQGNVFSCSVMHEALHNHYTQKSLSLSPGK

SEQ ID NO: 115 - protein, 431 aa, Homo sapiens; identical to SEQ ID NO: 16

SEQ ID NO: 116 - protein, 436 aa, Homo sapiens
LFTVTVPKELYIIEHGSNVTLECNFDTGSHVNLGAITAVLQKVENDTSPHRERATLLEEQLPLGKASFHIPQVQVRDEGQYQCIIIYGVAWDYKYLTLKVKASYRKINTHILKVPETDEVELTCQATGYPLAEVSWPNVSVPANTSHSRTPEGLYQVTSVLRLKPPPGRNFSCVFWNTHVRELTLASIDLQSQMEPRTHPTGGGGSGGGDKTHTCPPCPAPEDEGGPSVFLFPPKPKDTLMISRTPEVTCVVVDVSHEDPEVKFNWYVDGVEVHNAKTKPREEQYNSTYRVVSVLTVLHQDWLNGKEYKCKVSNKALPAPIEKTISKAKGQPREPQVYVYPPSREEMTKNQVSLTCLVKGFYPSDIAVEWESNGQPENNYKTTPPVLDEDGSFALVSKLTVDKSRWQQGNVFSCSVMHEALHNHYTQKSLSLSPGK

SEQ ID NO: 117 - protein, 436 aa, Homo sapiens
LFTVTVPKELYIIEHGSNVTLECNFDTGSHVNLGAIVAVLLKVENDTSPHRERATLLEEQLPLGKASFHIPQVQVRDEGQYQCIIIYGVAWDYKYLTLKVKASYRKINTHILKVPETDEVELTCQATGYPLAEVSWPNVSVPANTSHSRTPEGLYQVTSVLRLKPPPGRNFSCVFWNTHVRELTLASIDLQSQMEPRTHPTGGGGSGGGDKTHTCPPCPAPEDEGGPSVFLFPPKPKDTLMISRTPEVTCVVVDVSHEDPEVKFNWYVDGVEVHNAKTKPREEQYNSTYRVVSVLTVLHQDWLNGKEYKCKVSNKALPAPIEKTISKAKGQPREPQVYVYPPSREEMTKNQVSLTCLVKGFYPSDIAVEWESNGQPENNYKTTPPVLDEDGSFALVSKLTVDKSRWQQGNVFSCSVMHEALHNHYTQKSLSLSPGK

SEQ ID NO: 118 - protein, 436 aa, Homo sapiens
LFTVTVPKELYIIEHGSNVTLECNFDTGSHVNLGAITAVLQKVENDTSPHRERATLLEEQLPLGKASFHIPQVQVRDEGQYQCIIIYGVAWDYKYLTLKVKASYRKINTHILKVPETDEVELTCQATGYPLAEVSWPNVSVPANTSHSRTPEGLYQVTSVLRLKPPPGRNFSCVFWNTHVRELTLASIDLQSQMEPRTHPTGGGGSGGGDKTHTCPPCPAPEKKGGPSVFLFPPKPKDTLMISRTPEVTCVVVDVSHEDPEVKFNWYVDGVEVHNAKTKPREEQYNSTYRVVSVLTVLHQDWLNGKEYKCKVSNKALPAPIEKTISKAKGQPREPQVYVLPPSREEMTKNQVSLLCLVKGFYPSDIAVEWESNGQPENRYMTWPPVLDSDGSFFLYSKLTVDKSRWQQGNVFSCSVMHEALHNHYTQKSLSLSPGK

SEQ ID NO: 119 - protein, 436 aa, Homo sapiens
LFTVTVPKELYIIEHGSNVTLECNFDTGSHVNLGAIVAVLLKVENDTSPHRERATLLEEQLPLGKASFHIPQVQVRDEGQYQCIIIYGVAWDYKYLTLKVKASYRKINTHILKVPETDEVELTCQATGYPLAEVSWPNVSVPANTSHSRTPEGLYQVTSVLRLKPPPGRNFSCVFWNTHVRELTLASIDLQSQMEPRTHPTGGGGSGGGDKTHTCPPCPAPEKKGGPSVFLFPPKPKDTLMISRTPEVTCVVVDVSHEDPEVKFNWYVDGVEVHNAKTKPREEQYNSTYRVVSVLTVLHQDWLNGKEYKCKVSNKALPAPIEKTISKAKGQPREPQVYVLPPSREEMTKNQVSLLCLVKGFYPSDIAVEWESNGQPENRYMTWPPVLDSDGSFFLYSKLTVDKSRWQQGNVFSCSVMHEALHNHYTQKSLSLSPGK

SEQ ID NO: 120 - protein, 290 aa, Homo sapiens
MRIFAVFIFMTYWHLLNAFTVTVPKDLYVVEYGSNMTIECKFPVEKQLDLAALIVYWEMEDKNIIQFVHGEEDLKVQHSSYRQRARLLKDQLSLGNAALQITDVKLQDAGVYRCMISYGGADYKRITVKVNAPYNKINQRILVVDPVTSEHELTCQAEGYPKAEVIWTSSDHQVLSGKTTTTNSKREEKLFNVTSTLRINTTTNEIFYCTFRRLDPEENHTAELVIPELPLAHPPNERTHLVILGAILLCLGVALTFIFRLRKGRMMDVKKCGIQDTNSKKQSDTHLEET

SEQ ID NO: 121 - protein, 220 aa, Homo sapiens
FTVTVPKDLYVVEYGSNMTIECKFPVEKQLDLAALIVYWEMEDKNIIQFVHGEEDLKVQHSSYRQRARLLKDQLSLGNAALQITDVKLQDAGVYRCMISYGGADYKRITVKVNAPYNKINQRILVVDPVTSEHELTCQAEGYPKAEVIWTSSDHQVLSGKTTTTNSKREEKLFNVTSTLRINTTTNEIFYCTFRRLDPEENHTAELVIPELPLAHPPNER

SEQ ID NO: 122 - protein, 220 aa, Homo sapiens
FTVTVPKDLYVVEYGSNMTIECKFPVEKQLDLAALIVYWMMEDKNIIQFVHGEEDLKVQHSSYRQRARLLKDQLSLGNAALQITDVKLQDAGVYTCLIAYKGADYKRITVKVNAPYNKINQRILVVDPVTSEHELTCQAEGYPKAEVIWTSSDHQVLSGKTTTTNSKREEKLFNVTSTLRINTTTNEIFYCTFRRLDPEENHTAELVIPELPLAHPPNER

SEQ ID NO: 123 - protein, 220 aa, Homo sapiens
FTVTVPKDLYVVEYGSNMTIECKFPVEKQLDLAALQVYWMMEDKNIIQFVHGEEDLKVQHSSYRQRARLLKDQLSLGNAALQITDVKLQDAGVYTCLIAYKGADYKRITVKVNAPYNKINQRILVVDPVTSEHELTCQAEGYPKAEVIWTSSDHQVLSGKTTTTNSKREEKLFNVTSTLRINTTTNEIFYCTFRRLDPEENHTAELVIPELPLAHPPNER

SEQ ID NO: 124 - protein, 220 aa, Homo sapiens
FTVTVPKDLYVVEYGSNMTIECKFPVEKQLDLAALQVYWEMEDKNIIQFVHGEEDLKVQHSSYRQRARLLKDQLSLGNAALQITDVKLQDAGVYTCLIAYKGADYKRITVKVNAPYNKINQRILVVDPVTSEHELTCQAEGYPKAEVIWTSSDHQVLSGKTTTTNSKREEKLFNVTSTLRINTTTNEIFYCTFRRLDPEENHTAELVIPELPLAHPPNER

SEQ ID NO: 125 - protein, 220 aa, Homo sapiens
FTVTVPKDLYVVEYGSNMTIECKFPVEKQLDLAALQVYWMMEDKNIIQFVHGEEDLKVQHSSYRQRARLLKDQLSLGNAALQITDVKLQDAGVYRCLIAYKGADYKRITVKVNAPYNKINQRILVVDPVTSEHELTCQAEGYPKAEVIWTSSDHQVLSGKTTTTNSKREEKLFNVTSTLRINTTTNEIFYCTFRRLDPEENHTAELVIPELPLAHPPNER

SEQ ID NO: 126 - protein, 220 aa, Homo sapiens
FTVTVPKDLYVVEYGSNMTIECKFPVEKQLDLAALQVYWMMEDKNIIQFVHGEEDLKVQHSSYRQRARLLKDQLSLGNAALQITDVKLQDAGVYTCMIAYKGADYKRITVKVNAPYNKINQRILVVDPVTSEHELTCQAEGYPKAEVIWTSSDHQVLSGKTTTTNSKREEKLFNVTSTLRINTTTNEIFYCTFRRLDPEENHTAELVIPELPLAHPPNER

SEQ ID NO: 127 - protein, 220 aa, Homo sapiens
FTVTVPKDLYVVEYGSNMTIECKFPVEKQLDLAALQVYWMMEDKNIIQFVHGEEDLKVQHSSYRQRARLLKDQLSLGNAALQITDVKLQDAGVYTCLISYKGADYKRITVKVNAPYNKINQRILVVDPVTSEHELTCQAEGYPKAEVIWTSSDHQVLSGKTTTTNSKREEKLFNVTSTLRINTTTNEIFYCTFRRLDPEENHTAELVIPELPLAHPPNER

SEQ ID NO: 128 - protein, 220 aa, Homo sapiens
FTVTVPKDLYVVEYGSNMTIECKFPVEKQLDLAALQVYWMMEDKNIIQFVHGEEDLKVQHSSYRQRARLLKDQLSLGNAALQITDVKLQDAGVYTCLIAYGGADYKRITVKVNAPYNKINQRILVVDPVTSEHELTCQAEGYPKAEVIWTSSDHQVLSGKTTTTNSKREEKLFNVTSTLRINTTTNEIFYCTFRRLDPEENHTAELVIPELPLAHPPNER

SEQ ID NO: 129 - protein, 220 aa, Homo sapiens
FTVTVPKDLYVVEYGSNMTIECKFPVEKQLDLAALQVFWMMEDKNIIQFVHGEEDLKVQHSSYRQRARLLKDQLSLGNAALQITDVKLQDAGVYTCLIAYKGADYKRITVKVNAPYNKINQRILVVDPVTSEHELTCQAEGYPKAEVIWTSSDHQVLSGKTTTTNSKREEKLFNVTSTLRINTTTNEIFYCTFRRLDPEENHTAELVIPELPLAHPPNER

SEQ ID NO: 130 - protein, 455 aa, Homo sapiens
FTVTVPKDLYVVEYGSNMTIECKFPVEKQLDLAALIVYWEMEDKNIIQFVHGEEDLKVQHSSYRQRARLLKDQLSLGNAALQITDVKLQDAGVYRCMISYGGADYKRITVKVNAPYNKINQRILVVDPVTSEHELTCQAEGYPKAEVIWTSSDHQVLSGKTTTTNSKREEKLFNVTSTLRINTTTNEIFYCTFRRLDPEENHTAELVIPELPLAHPPNERGGGGSGGGDKTHTCPPCPAPEDEGGPSVFLFPPKPKDTLMISRTPEVTCVVVDVSHEDPEVKFNWYVDGVEVHNAKTKPREEQYNSTYRVVSVLTVLHQDWLNGKEYKCKVSNKALPAPIEKTISKAKGQPREPQVYVYPPSREEMTKNQVSLTCLVKGFYPSDIAVEWESNGQPENNYKTTPPVLDEDGSFALVSKLTVDKSRWQQGNVFSCSVMHEALHNHYTQKSLSLSPGK

SEQ ID NO: 131 - protein, 455 aa, Homo sapiens
FTVTVPKDLYVVEYGSNMTIECKFPVEKQLDLAALIVYWEMEDKNIIQFVHGEEDLKVQHSSYRQRARLLKDQLSLGNAALQITDVKLQDAGVYRCMISYGGADYKRITVKVNAPYNKINQRILVVDPVTSEHELTCQAEGYPKAEVIWTSSDHQVLSGKTTTTNSKREEKLFNVTSTLRINTTTNEIFYCTFRRLDPEENHTAELVIPELPLAHPPNERGGGGSGGGDKTHTCPPCPAPEKKGGPSVFLFPPKPKDTLMISRTPEVTCVVVDVSHEDPEVKFNWYVDGVEVHNAKTKPREEQYNSTYRVVSVLTVLHQDWLNGKEYKCKVSNKALPAPIEKTISKAKGQPREPQVYVLPPSREEMTKNQVSLLCLVKGFYPSDIAVEWESNGQPENRYMTWPPVLDSDGSFFLYSKLTVDKSRWQQGNVFSCSVMHEALHNHYTQKSLSLSPGK

SEQ ID NO: 132 - protein, 455 aa, Homo sapiens
FTVTVPKDLYVVEYGSNMTIECKFPVEKQLDLAALQVYWMMEDKNIIQFVHGEEDLKVQHSSYRQRARLLKDQLSLGNAALQITDVKLQDAGVYTCLIAYKGADYKRITVKVNAPYNKINQRILVVDPVTSEHELTCQAEGYPKAEVIWTSSDHQVLSGKTTTTNSKREEKLFNVTSTLRINTTTNEIFYCTFRRLDPEENHTAELVIPELPLAHPPNERGGGGSGGGDKTHTCPPCPAPEDEGGPSVFLFPPKPKDTLMISRTPEVTCVVVDVSHEDPEVKFNWYVDGVEVHNAKTKPREEQYNSTYRVVSVLTVLHQDWLNGKEYKCKVSNKALPAPIEKTISKAKGQPREPQVYVYPPSREEMTKNQVSLTCLVKGFYPSDIAVEWESNGQPENNYKTTPPVLDEDGSFALVSKLTVDKSRWQQGNVFSCSVMHEALHNHYTQKSLSLSPGK

SEQ ID NO: 133 - protein, 455 aa, Homo sapiens
FTVTVPKDLYVVEYGSNMTIECKFPVEKQLDLAALQVYWMMEDKNIIQFVHGEEDLKVQHSSYRQRARLLKDQLSLGNAALQITDVKLQDAGVYTCLIAYGGADYKRITVKVNAPYNKINQRILVVDPVTSEHELTCQAEGYPKAEVIWTSSDHQVLSGKTTTTNSKREEKLFNVTSTLRINTTTNEIFYCTFRRLDPEENHTAELVIPELPLAHPPNERGGGGSGGGDKTHTCPPCPAPEDEGGPSVFLFPPKPKDTLMISRTPEVTCVVVDVSHEDPEVKFNWYVDGVEVHNAKTKPREEQYNSTYRVVSVLTVLHQDWLNGKEYKCKVSNKALPAPIEKTISKAKGQPREPQVYVYPPSREEMTKNQVSLTCLVKGFYPSDIAVEWESNGQPENNYKTTPPVLDEDGSFALVSKLTVDKSRWQQGNVFSCSVMHEALHNHYTQKSLSLSPGK

SEQ ID NO: 134 - protein, 455 aa, Homo sapiens
FTVTVPKDLYVVEYGSNMTIECKFPVEKQLDLAALQVYWMMEDKNIIQFVHGEEDLKVQHSSYRQRARLLKDQLSLGNAALQITDVKLQDAGVYTCLIAYKGADYKRITVKVNAPYNKINQRILVVDPVTSEHELTCQAEGYPKAEVIWTSSDHQVLSGKTTTTNSKREEKLFNVTSTLRINTTTNEIFYCTFRRLDPEENHTAELVIPELPLAHPPNERGGGGSGGGDKTHTCPPCPAPEKKGGPSVFLFPPKPKDTLMISRTPEVTCVVVDVSHEDPEVKFNWYVDGVEVHNAKTKPREEQYNSTYRVVSVLTVLHQDWLNGKEYKCKVSNKALPAPIEKTISKAKGQPREPQVYVLPPSREEMTKNQVSLLCLVKGFYPSDIAVEWESNGQPENRYMTWPPVLDSDGSFFLYSKLTVDKSRWQQGNVFSCSVMHEALHNHYTQKSLSLSPGK

SEQ ID NO: 135 - protein, 455 aa, Homo sapiens
FTVTVPKDLYVVEYGSNMTIECKFPVEKQLDLAALQVYWMMEDKNIIQFVHGEEDLKVQHSSYRQRARLLKDQLSLGNAALQITDVKLQDAGVYTCLIAYGGADYKRITVKVNAPYNKINQRILVVDPVTSEHELTCQAEGYPKAEVIWTSSDHQVLSGKTTTTNSKREEKLFNVTSTLRINTTTNEIFYCTFRRLDPEENHTAELVIPELPLAHPPNERGGGGSGGGDKTHTCPPCPAPEKKGGPSVFLFPPKPKDTLMISRTPEVTCVVVDVSHEDPEVKFNWYVDGVEVHNAKTKPREEQYNSTYRVVSVLTVLHQDWLNGKEYKCKVSNKALPAPIEKTISKAKGQPREPQVYVLPPSREEMTKNQVSLLCLVKGFYPSDIAVEWESNGQPENRYMTWPPVLDSDGSFFLYSKLTVDKSRWQQGNVFSCSVMHEALHNHYTQKSLSLSPGK

SEQ ID NO: 136 - protein, 417 aa, Homo sapiens
MARAMAAAWPLLLVALLVLSWPPPGTGDVVVQAPTQVPGFLGDSVTLPCYLQVPNMEVTHVSQLTWARHGESGSMAVFHQTQGPSYSESKRLEFVAARLGAELRNASLRMFGLRVEDEGNYTCLFVTFPQGSRSVDIWLRVLAKPQNTAEVQKVQLTGEPVPMARCVSTGGRPPAQITWHSDLGGMPNTSQVPGFLSGTVTVTSLWILVPSSQVDGKNVTCKVEHESFEKPQLLTVNLTVYYPPEVSISGYDNNWYLGQNEATLTCDARSNPEPTGYNWSTTMGPLPPFAVAQGAQLLIRPVDKPINTTLICNVTNALGARQAELTVQVKEGPPSEHSGISRNAIIFLVLGILVFLILLGIGIYFYWSKCSREVLWHCHLCPSSTEHASASANGHVSYSAVSRENSSSQDPQTEGTR

SEQ ID NO: 137 - protein, 323 aa, Homo sapiens
WPPPGTGDVVVQAPTQVPGFLGDSVTLPCYLQVPNMEVTHVSQLTWARHGESGSMAVFHQTQGPSYSESKRLEFVAARLGAELRNASLRMFGLRVEDEGNYTCLFVTFPQGSRSVDIWLRVLAKPQNTAEVQKVQLTGEPVPMARCVSTGGRPPAQITWHSDLGGMPNTSQVPGFLSGTVTVTSLWILVPSSQVDGKNVTCKVEHESFEKPQLLTVNLTVYYPPEVSISGYDNNWYLGQNEATLTCDARSNPEPTGYNWSTTMGPLPPFAVAQGAQLLIRPVDKPINTTLICNVTNALGARQAELTVQVKEGPPSEHSGISRN

SEQ ID NO: 138 - protein, 558 aa, Homo sapiens
WPPPGTGDVVVQAPTQVPGFLGDSVTLPCYLQVPNMEVTHVSQLTWARHGESGSMAVFHQTQGPSYSESKRLEFVAARLGAELRNASLRMFGLRVEDEGNYTCLFVTFPQGSRSVDIWLRVLAKPQNTAEVQKVQLTGEPVPMARCVSTGGRPPAQITWHSDLGGMPNTSQVPGFLSGTVTVTSLWILVPSSQVDGKNVTCKVEHESFEKPQLLTVNLTVYYPPEVSISGYDNNWYLGQNEATLTCDARSNPEPTGYNWSTTMGPLPPFAVAQGAQLLIRPVDKPINTTLICNVTNALGARQAELTVQVKEGPPSEHSGISRNGGGGSGGGDKTHTCPPCPAPEDEGGPSVFLFPPKPKDTLMISRTPEVTCVVVDVSHEDPEVKFNWYVDGVEVHNAKTKPREEQYNSTYRVVSVLTVLHQDWLNGKEYKCKVSNKALPAPIEKTISKAKGQPREPQVYVYPPSREEMTKNQVSLTCLVKGFYPSDIAVEWESNGQPENNYKTTPPVLDEDGSFALVSKLTVDKSRWQQGNVFSCSVMHEALHNHYTQKSLSLSPGK

SEQ ID NO: 139 - protein, 558 aa, Homo sapiens
WPPPGTGDVVVQAPTQVPGFLGDSVTLPCYLQVPNMEVTHVSQLTWARHGESGSMAVFHQTQGPSYSESKRLEFVAARLGAELRNASLRMFGLRVEDEGNYTCLFVTFPQGSRSVDIWLRVLAKPQNTAEVQKVQLTGEPVPMARCVSTGGRPPAQITWHSDLGGMPNTSQVPGFLSGTVTVTSLWILVPSSQVDGKNVTCKVEHESFEKPQLLTVNLTVYYPPEVSISGYDNNWYLGQNEATLTCDARSNPEPTGYNWSTTMGPLPPFAVAQGAQLLIRPVDKPINTTLICNVTNALGARQAELTVQVKEGPPSEHSGISRNGGGGSGGGDKTHTCPPCPAPEKKGGPSVFLFPPKPKDTLMISRTPEVTCVVVDVSHEDPEVKFNWYVDGVEVHNAKTKPREEQYNSTYRVVSVLTVLHQDWLNGKEYKCKVSNKALPAPIEKTISKAKGQPREPQVYVLPPSREEMTKNQVSLLCLVKGFYPSDIAVEWESNGQPENRYMTWPPVLDSDGSFFLYSKLTVDKSRWQQGNVFSCSVMHEALHNHYTQKSLSLSPGK

SEQ ID NO: 140 - protein, 306 aa, Artificial Sequence
  Synthetic Construct
IWELKKDVYVVELDWYPDAPGEMVVLTCDTPEEDGITWTLDQSSEVLGSGKTLTIQVKEDGDAGQYTCHKGGEVLSHSLLLLHKKEDGIWSTDILKDQKEPKNKTFLRCEAKNYSGRFTCWWLTTISTDLTFSVKSSRGSSDPQGVTCGAATLSAERVRGDNKEYEYSVECQEDSACPAAEESLPIEVMVDAVHKLKYENYTSSFFIRDIIKPDPPKNLQLKPLKNSRQVEVSWEYPDTWSTPHSYFSLTFCVQVQGKSKREKKDRVFTDKTSATVICRKNASISVRAQDRYYSSSWSEWASVPCS

SEQ ID NO: 141 - protein, 126 aa, Homo sapiens [sequence omitted]

SEQ ID NO: 142 - protein, 955 aa, Homo sapiens; identical to SEQ ID NO: 18

SEQ ID NO: 143 - protein, 970 aa, Homo sapiens; identical to SEQ ID NO: 20

SEQ ID NO: 144 - protein, 579 aa, Artificial Sequence
  Synthetic Construct
QVQLVESGGGVVQPGRSLRLDCKASGITFSNSGMHWVRQAPGKGLEWVAVIWYDGSKRYYADSVKGRFTISRDNSKNTLFLQMNSLRAEDTAVYYCATNDDYWGQGTLVTVSSASTKGPSVFPLAPSSKSTSGGTAALGCLVKDYFPEPVTVSWNSGALTSGVHTFPAVLQSSGLYSLSSVVTVPSSSLGTQTYICNVNHKPSNTKVDKKVEPKSCDKPAPTSSSTKKTQLQLEHLLLDLQMILNGINNYKNPKLTDMLTFEFYMPKKATELKHLQCLERELKPLEEVLNLAQSKNFHLRPRDLISNINVIVLELKGSETTFMCEYADETATIVEFLNRWITFCQSIISTLTDKTHTCPPCPAPEDEGGPSVFLFPPKPKDTLMISRTPEVTCVVVDVSHEDPEVKFNWYVDGVEVHNAKTKPREEQYNSTYRVVSVLTVLHQDWLNGKEYKCKVSNKALPAPIEKTISKAKGQPREPQVYVYPPSREEMTKNQVSLTCLVKGFYPSDIAVEWESNGQPENNYKTTPPVLDEDGSFALVSKLTVDKSRWQQGNVFSCSVMHEALHNHYTQKSLSLSPGK

SEQ ID NO: 145 - protein, 946 aa, Artificial Sequence
  Synthetic Construct
QVQLVESGGGVVQPGRSLRLDCKASGITFSNSGMHWVRQAPGKGLEWVAVIWYDGSKRYYADSVKGRFTISRDNSKNTLFLQMNSLRAEDTAVYYCATNDDYWGQGTLVTVSSASTKGPSVFPLAPSSKSTSGGTAALGCLVKDYFPEPVTVSWNSGALTSGVHTFPAVLQSSGLYSLSSVVTVPSSSLGTQTYICNVNHKPSNTKVDKKVEPKSCDKPGSGIWELKKDVYVVELDWYPDAPGEMVVLTCDTPEEDGITWTLDQSSEVLGSGKTLTIQVKAAGDAGQYTCHKGGEVLSHSLLLLHKKEDGIWSTDILKDQKEPKNKTFLRCEAKNYSGRFTCWWLTTISTDLTFSVKSSRGSSDPQGVTCGAATLSAERVRGDNKEYEYSVECQEDSACPAAEESLPIEVMVDAVHKLKYENYTSSFFIRDIIKPDPPKNLQLKPLKNSRQVEVSWEYPDTWSTPHSYFSLTFCVQVQGKSKREKKDRVFTDKTSATVICRKNASISVRAQDRYYSSSWSEWASVPCSGGGGSGGGGSGGGGSGGGGSGRAVPGGSSPAWTQCQQLSQKLCTLAWSAHPLVGHMDLREEGDEETTNDVPHIQCGDGCDPQGLRDNSQFCLQRIHQGLIFYEKLLGSDIFTGEPSLLPDSPVGQLHASLLGLSQLLQPEGHHWETQQIPSLSPSQPWQRLLLRFKILRSLQAFVAVAARVFAHGAATLSPDKTHTCPPCPAPEDEGGPSVFLFPPKPKDTLMISRTPEVTCVVVDVSHEDPEVKFNWYVDGVEVHNAKTKPREEQYNSTYRVVSVLTVLHQDWLNGKEYKCKVSNKALPAPIEKTISKAKGQPREPQVYVYPPSREEMTKNQVSLTCLVKGFYPSDIAVEWESNGQPENNYKTTPPVLDEDGSFALVSKLTVDKSRWQQGNVFSCSVMHEALHNHYTQKSLSLSPGK

SEQ ID NO: 146 - protein, 790 aa, Artificial Sequence
  Synthetic Construct
QVQLVESGGGVVQPGRSLRLDCKASGITFSNSGMHWVRQAPGKGLEWVAVIWYDGSKRYYADSVKGRFTISRDNSKNTLFLQMNSLRAEDTAVYYCATNDDYWGQGTLVTVSSASTKGPSVFPLAPSSKSTSGGTAALGCLVKDYFPEPVTVSWNSGALTSGVHTFPAVLQSSGLYSLSSVVTVPSSSLGTQTYICNVNHKPSNTKVDKKVEPKSCDKPGSGSPGQGTQSENSCTHFPGNLPNMLRDLADAFSRVKTFFQMKDQLDNLLLKESLLEDFKGYLGCQALSEMIQFYLEEVMPQAENQDPDIKAHVNSLGENLKTLRLRLRRCHRFLPCENKSKAVEQVKNAFNKLQEKGIYKAMSEFDIFINYIEAYMTMKIRNFEGGGSGGGGSGGGGSGGGGSSPGQGTQSENSCTHFPGNLPNMLRDLADAFSRVKTFFQMKDQLDNLLLKESLLEDFKGYLGCQALSEMIQFYLEEVMPQAENQDPDIKAHVNSLGENLKTLRLRLRRCHRFLPCENKSKAVEQVKNAFNKLQEKGIYKAMSEFDIFINYIEAYMTMKIRNDKTHTCPPCPAPEDEGGPSVFLFPPKPKDTLMISRTPEVTCVVVDVSHEDPEVKFNWYVDGVEVHNAKTKPREEQYNSTYRVVSVLTVLHQDWLNGKEYKCKVSNKALPAPIEKTISKAKGQPREPQVYVYPPSREEMTKNQVSLTCLVKGFYPSDIAVEWESNGQPENNYKTTPPVLDEDGSFALVSKLTVDKSRWQQGNVFSCSVMHEALHNHYTQKSLSLSPGK

SEQ ID NO: 147 - protein, 746 aa, Artificial Sequence
  Synthetic Construct
QVQLVESGGGVVQPGRSLRLDCKASGITFSNSGMHWVRQAPGKGLEWVAVIWYDGSKRYYADSVKGRFTISRDNSKNTLFLQMNSLRAEDTAVYYCATNDDYWGQGTLVTVSSASTKGPSVFPLAPSSKSTSGGTAALGCLVKDYFPEPVTVSWNSGALTSGVHTFPAVLQSSGLYSLSSVVTVPSSSLGTQTYICNVNHKPSNTKVDKKVEPKSCDKPGSGQDPYVKEAENLKKYFNAGHSDVVDNGTLFLGILKNWKEESDRKIMQSQIVSFYFKLFKNFKDDQSIQKSVETIKEDMNVKFFNSNKKKRDDFEKLTNYSVTDLNVQRKAIHELIQVMAELSPAAKTGKRKRSQMLFRGFEGGGSGGGGSGGGGSGGGGSQDPYVKEAENLKKYFNAGHSDVVDNGTLFLGILKNWKEESDRKIMQSQIVSFYFKLFKNFKDDQSIQKSVETIKEDMNVKFFNSNKKKRDDFEKLTNYSVTDLNVQRKAIHELIQVMAELSPAAKTGKRKRSQMLFRGDKTHTCPPCPAPEDEGGPSVFLFPPKPKDTLMISRTPEVTCVVVDVSHEDPEVKFNWYVDGVEVHNAKTKPREEQYNSTYRVVSVLTVLHQDWLNGKEYKCKVSNKALPAPIEKTISKAKGQPREPQVYVYPPSREEMTKNQVSLTCLVKGFYPSDIAVEWESNGQPENNYKTTPPVLDEDGSFALVSKLTVDKSRWQQGNVFSCSVMHEALHNHYTQKSLSLSPGK

SEQ ID NO: 148 - protein, 618 aa, Artificial Sequence
  Synthetic Construct
QVQLVESGGGVVQPGRSLRLDCKASGITFSNSGMHWVRQAPGKGLEWVAVIWYDGSKRYYADSVKGRFTISRDNSKNTLFLQMNSLRAEDTAVYYCATNDDYWGQGTLVTVSSASTKGPSVFPLAPSSKSTSGGTAALGCLVKDYFPEPVTVSWNSGALTSGVHTFPAVLQSSGLYSLSSVVTVPSSSLGTQTYICNVNHKPSNTKVDKKVEPKSCDKPGSGGGGGCDLPQTHSLGSRRTLMLLAQMRKISLFSCAKDRHDFGFPQEEFGNQFQKAETIPVLHEMIQQIFNLFSTKDSSAAWDETLLDKFYTELYQQLNDLEACVIQGVGVTETPLMKEDSILAVRKYFQRITLYLKEKKYSPCAWEVVRAEIMRSFSLSTNLQESLRSKEDKTHTCPPCPAPEDEGGPSVFLFPPKPKDTLMISRTPEVTCVVVDVSHEDPEVKFNWYVDGVEVHNAKTKPREEQYNSTYRVVSVLTVLHQDWLNGKEYKCKVSNKALPAPIEKTISKAKGQPREPQVYVYPPSREEMTKNQVSLTCLVKGFYPSDIAVEWESNGQPENNYKTTPPVLDEDGSFALVSKLTVDKSRWQQGNVFSCSVMHEALHNHYTQKSLSLSPGK

SEQ ID NO: 149 - protein, 973 aa, Artificial Sequence
  Synthetic Construct
QVQLVESGGGVVQPGRSLRLDCKASGITFSNSGMHWVRQAPGKGLEWVAVIWYDGSKRYYADSVKGRFTISRDNSKNTLFLQMNSLRAEDTAVYYCATNNDYWGQGTLVTVSSASTKGPSVFPLAPSSKSTSGGTAALGCLVKDYFPEPVTVSWNSGALTSGVHTFPAVLQSSGLYSLSSVVTVPSSSLGTQTYICNVNHKPSNTKVDKKVEPKSCDKPGSGIWELKKDVYVVELDWYPDAPGEMVVLTCDTPEEDGITWTLDQSSEVLGSGKTLTIQVKAAGDAGQYTCHKGGEVLSHSLLLLHKKEDGIWSTDILKDQKEPKNKTFLRCEAKNYSGRFTCWWLTTISTDLTFSVKSSRGSSDPQGVTCGAATLSAERVRGDNKEYEYSVECQEDSACPAAEESLPIEVMVDAVHKLKYENYTSSFFIRDIIKPDPPKNLQLKPLKNSRQVEVSWEYPDTWSTPHSYFSLTFCVQVQGKSKREKKDRVFTDKTSATVICRKNASISVRAQDRYYSSSWSEWASVPCSGGGGSGGGGSGGGGSGGGGSGRNLPVATPDPGMFPCLHHSQNLLRAVSNMLQKARQTLEFYPCTSEEIDHEDITKDKTSTVEACLPLELTKNESCLNSRETSFITNGSCLASRKTSFMMALCLSSIYEDLKMYQVEFKTMNAKLLMDPKRQIFLDQNMLAVIDELMQALNFNSETVPQKSSLEEPDFYKTKIKLCILLHAFRIRAVTIDRVMSYLNASDKTHTCPPCPAPEDEGGPSVFLFPPKPKDTLMISRTPEVTCVVVDVSHEDPEVKFNWYVDGVEVHNAKTKPREEQYNSTYRVVSVLTVLHQDWLNGKEYKCKVSNKALPAPIEKTISKAKGQPREPQVYVYPPSREEMTKNQVSLTCLVKGFYPSDIAVEWESNGQPENNYKTTPPVLDEDGSFALVSKLTVDKSRWQQGNVFSCSVMHEALHNHYTQKSLSLSPGK

SEQ ID NO: 150 - protein, 973 aa, Artificial Sequence
  Synthetic Construct
QVQLVESGGGVVQPGRSLRLDCKASGITFSNSGMHWVRQAPGKGLEWVAVIWYDGSKRYYADSVKGRFTISRDNSKNTLFLQMNSLRAEDTAVYYCATNGDYWGQGTLVTVSSASTKGPSVFPLAPSSKSTSGGTAALGCLVKDYFPEPVTVSWNSGALTSGVHTFPAVLQSSGLYSLSSVVTVPSSSLGTQTYICNVNHKPSNTKVDKKVEPKSCDKPGSGIWELKKDVYVVELDWYPDAPGEMVVLTCDTPEEDGITWTLDQSSEVLGSGKTLTIQVKAAGDAGQYTCHKGGEVLSHSLLLLHKKEDGIWSTDILKDQKEPKNKTFLRCEAKNYSGRFTCWWLTTISTDLTFSVKSSRGSSDPQGVTCGAATLSAERVRGDNKEYEYSVECQEDSACPAAEESLPIEVMVDAVHKLKYENYTSSFFIRDIIKPDPPKNLQLKPLKNSRQVEVSWEYPDTWSTPHSYFSLTFCVQVQGKSKREKKDRVFTDKTSATVICRKNASISVRAQDRYYSSSWSEWASVPCSGGGGSGGGGSGGGGSGGGGSGRNLPVATPDPGMFPCLHHSQNLLRAVSNMLQKARQTLEFYPCTSEEIDHEDITKDKTSTVEACLPLELTKNESCLNSRETSFITNGSCLASRKTSFMMALCLSSIYEDLKMYQVEFKTMNAKLLMDPKRQIFLDQNMLAVIDELMQALNFNSETVPQKSSLEEPDFYKTKIKLCILLHAFRIRAVTIDRVMSYLNASDKTHTCPPCPAPEDEGGPSVFLFPPKPKDTLMISRTPEVTCVVVDVSHEDPEVKFNWYVDGVEVHNAKTKPREEQYNSTYRVVSVLTVLHQDWLNGKEYKCKVSNKALPAPIEKTISKAKGQPREPQVYVYPPSREEMTKNQVSLTCLVKGFYPSDIAVEWESNGQPENNYKTTPPVLDEDGSFALVSKLTVDKSRWQQGNVFSCSVMHEALHNHYTQKSLSLSPGK

SEQ ID NO: 151 - protein, 973 aa, Artificial Sequence
  Synthetic Construct
QVQLVESGGGVVQPGRSLRLDCKASGITFSNSGMHWVRQAPGKGLEWVAVIWYDGSKRYYADSVKGRFTISRDNSKNTLFLQMNSLRAEDTAVYYCATNRDYWGQGTLVTVSSASTKGPSVFPLAPSSKSTSGGTAALGCLVKDYFPEPVTVSWNSGALTSGVHTFPAVLQSSGLYSLSSVVTVPSSSLGTQTYICNVNHKPSNTKVDKKVEPKSCDKPGSGIWELKKDVYVVELDWYPDAPGEMVVLTCDTPEEDGITWTLDQSSEVLGSGKTLTIQVKAAGDAGQYTCHKGGEVLSHSLLLLHKKEDGIWSTDILKDQKEPKNKTFLRCEAKNYSGRFTCWWLTTISTDLTFSVKSSRGSSDPQGVTCGAATLSAERVRGDNKEYEYSVECQEDSACPAAEESLPIEVMVDAVHKLKYENYTSSFFIRDIIKPDPPKNLQLKPLKNSRQVEVSWEYPDTWSTPHSYFSLTFCVQVQGKSKREKKDRVFTDKTSATVICRKNASISVRAQDRYYSSSWSEWASVPCSGGGGSGGGGSGGGGSGGGGSGRNLPVATPDPGMFPCLHHSQNLLRAVSNMLQKARQTLEFYPCTSEEIDHEDITKDKTSTVEACLPLELTKNESCLNSRETSFITNGSCLASRKTSFMMALCLSSIYEDLKMYQVEFKTMNAKLLMDPKRQIFLDQNMLAVIDELMQALNFNSETVPQKSSLEEPDFYKTKIKLCILLHAFRIRAVTIDRVMSYLNASDKTHTCPPCPAPEDEGGPSVFLFPPKPKDTLMISRTPEVTCVVVDVSHEDPEVKFNWYVDGVEVHNAKTKPREEQYNSTYRVVSVLTVLHQDWLNGKEYKCKVSNKALPAPIEKTISKAKGQPREPQVYVYPPSREEMTKNQVSLTCLVKGFYPSDIAVEWESNGQPENNYKTTPPVLDEDGSFALVSKLTVDKSRWQQGNVFSCSVMHEALHNHYTQKSLSLSPGK

SEQ ID NO: 152 - protein, 973 aa, Artificial Sequence
  Synthetic Construct
QVQLVESGGGVVQPGRSLRLDCKASGITFSNSGMHWVRQAPGKGLEWVAVIWYDGSKRYYADSVKGRFTISRDNSKNTLFLQMNSLRAEDTAVYYCATGDDYWGQGTLVTVSSASTKGPSVFPLAPSSKSTSGGTAALGCLVKDYFPEPVTVSWNSGALTSGVHTFPAVLQSSGLYSLSSVVTVPSSSLGTQTYICNVNHKPSNTKVDKKVEPKSCDKPGSGIWELKKDVYVVELDWYPDAPGEMVVLTCDTPEEDGITWTLDQSSEVLGSGKTLTIQVKAAGDAGQYTCHKGGEVLSHSLLLLHKKEDGIWSTDILKDQKEPKNKTFLRCEAKNYSGRFTCWWLTTISTDLTFSVKSSRGSSDPQGVTCGAATLSAERVRGDNKEYEYSVECQEDSACPAAEESLPIEVMVDAVHKLKYENYTSSFFIRDIIKPDPPKNLQLKPLKNSRQVEVSWEYPDTWSTPHSYFSLTFCVQVQGKSKREKKDRVFTDKTSATVICRKNASISVRAQDRYYSSSWSEWASVPCSGGGGSGGGGSGGGGSGGGGSGRNLPVATPDPGMFPCLHHSQNLLRAVSNMLQKARQTLEFYPCTSEEIDHEDITKDKTSTVEACLPLELTKNESCLNSRETSFITNGSCLASRKTSFMMALCLSSIYEDLKMYQVEFKTMNAKLLMDPKRQIFLDQNMLAVIDELMQALNFNSETVPQKSSLEEPDFYKTKIKLCILLHAFRIRAVTIDRVMSYLNASDKTHTCPPCPAPEDEGGPSVFLFPPKPKDTLMISRTPEVTCVVVDVSHEDPEVKFNWYVDGVEVHNAKTKPREEQYNSTYRVVSVLTVLHQDWLNGKEYKCKVSNKALPAPIEKTISKAKGQPREPQVYVYPPSREEMTKNQVSLTCLVKGFYPSDIAVEWESNGQPENNYKTTPPVLDEDGSFALVSKLTVDKSRWQQGNVFSCSVMHEALHNHYTQKSLSLSPGK

SEQ ID NO: 153 - protein, 973 aa, Artificial Sequence
  Synthetic Construct
QVQLVESGGGVVQPGRSLRLDCKASGITFSNSGMHWVRQAPGKGLEWVAVIWYDGSKRYYADSVKGRFTISRDNSKNTLFLQMNSLRAEDTAVYYCATADDYWGQGTLVTVSSASTKGPSVFPLAPSSKSTSGGTAALGCLVKDYFPEPVTVSWNSGALTSGVHTFPAVLQSSGLYSLSSVVTVPSSSLGTQTYICNVNHKPSNTKVDKKVEPKSCDKPGSGIWELKKDVYVVELDWYPDAPGEMVVLTCDTPEEDGITWTLDQSSEVLGSGKTLTIQVKAAGDAGQYTCHKGGEVLSHSLLLLHKKEDGIWSTDILKDQKEPKNKTFLRCEAKNYSGRFTCWWLTTISTDLTFSVKSSRGSSDPQGVTCGAATLSAERVRGDNKEYEYSVECQEDSACPAAEESLPIEVMVDAVHKLKYENYTSSFFIRDIIKPDPPKNLQLKPLKNSRQVEVSWEYPDTWSTPHSYFSLTFCVQVQGKSKREKKDRVFTDKTSATVICRKNASISVRAQDRYYSSSWSEWASVPCSGGGGSGGGGSGGGGSGGGGSGRNLPVATPDPGMFPCLHHSQNLLRAVSNMLQKARQTLEFYPCTSEEIDHEDITKDKTSTVEACLPLELTKNESCLNSRETSFITNGSCLASRKTSFMMALCLSSIYEDLKMYQVEFKTMNAKLLMDPKRQIFLDQNMLAVIDELMQALNFNSETVPQKSSLEEPDFYKTKIKLCILLHAFRIRAVTIDRVMSYLNASDKTHTCPPCPAPEDEGGPSVFLFPPKPKDTLMISRTPEVTCVVVDVSHEDPEVKFNWYVDGVEVHNAKTKPREEQYNSTYRVVSVLTVLHQDWLNGKEYKCKVSNKALPAPIEKTISKAKGQPREPQVYVYPPSREEMTKNQVSLTCLVKGFYPSDIAVEWESNGQPENNYKTTPPVLDEDGSFALVSKLTVDKSRWQQGNVFSCSVMHEALHNHYTQKSLSLSPGK

SEQ ID NO: 154 - protein, 973 aa, Artificial Sequence
  Synthetic Construct
QVQLVESGGGVVQPGRSLRLDCKASGITFSNSGMHWVRQAPGKGLEWVAVIWYDGSKRYYADSVKGRFTISRDNSKNTLFLQMNSLRAEDTAVYYCATMDDYWGQGTLVTVSSASTKGPSVFPLAPSSKSTSGGTAALGCLVKDYFPEPVTVSWNSGALTSGVHTFPAVLQSSGLYSLSSVVTVPSSSLGTQTYICNVNHKPSNTKVDKKVEPKSCDKPGSGIWELKKDVYVVELDWYPDAPGEMVVLTCDTPEEDGITWTLDQSSEVLGSGKTLTIQVKAAGDAGQYTCHKGGEVLSHSLLLLHKKEDGIWSTDILKDQKEPKNKTFLRCEAKNYSGRFTCWWLTTISTDLTFSVKSSRGSSDPQGVTCGAATLSAERVRGDNKEYEYSVECQEDSACPAAEESLPIEVMVDAVHKLKYENYTSSFFIRDIIKPDPPKNLQLKPLKNSRQVEVSWEYPDTWSTPHSYFSLTFCVQVQGKSKREKKDRVFTDKTSATVICRKNASISVRAQDRYYSSSWSEWASVPCSGGGGSGGGGSGGGGSGGGGSGRNLPVATPDPGMFPCLHHSQNLLRAVSNMLQKARQTLEFYPCTSEEIDHEDITKDKTSTVEACLPLELTKNESCLNSRETSFITNGSCLASRKTSFMMALCLSSIYEDLKMYQVEFKTMNAKLLMDPKRQIFLDQNMLAVIDELMQALNFNSETVPQKSSLEEPDFYKTKIKLCILLHAFRIRAVTIDRVMSYLNASDKTHTCPPCPAPEDEGGPSVFLFPPKPKDTLMISRTPEVTCVVVDVSHEDPEVKFNWYVDGVEVHNAKTKPREEQYNSTYRVVSVLTVLHQDWLNGKEYKCKVSNKALPAPIEKTISKAKGQPREPQVYVYPPSREEMTKNQVSLTCLVKGFYPSDIAVEWESNGQPENNYKTTPPVLDEDGSFALVSKLTVDKSRWQQGNVFSCSVMHEALHNHYTQKSLSLSPGK

SEQ ID NO: 155 - protein, 980 aa, Homo sapiens
FTVTVPKDLYVVEYGSNMTIECKFPVEKQLDLAALQVYWMMEDKNIIQFVHGEEDLKVQHSSYRQRARLLKDQLSLGNAALQITDVKLQDAGVYTCLIAYKGADYKRITVKVNAPYNKINQRILVVDPVTSEHELTCQAEGYPKAEVIWTSSDHQVLSGKTTTTNSKREEKLFNVTSTLRINTTTNEIFYCTFRRLDPEENHTAELVIPELPLAHPPNERGGGGSGGGIWELKKDVYVVELDWYPDAPGEMVVLTCDTPEEDGITWTLDQSSEVLGSGKTLTIQVKAAGDAGQYTCHKGGEVLSHSLLLLHKKEDGIWSTDILKDQKEPKNKTFLRCEAKNYSGRFTCWWLTTISTDLTFSVKSSRGSSDPQGVTCGAATLSAERVRGDNKEYEYSVECQEDSACPAAEESLPIEVMVDAVHKLKYENYTSSFFIRDIIKPDPPKNLQLKPLKNSRQVEVSWEYPDTWSTPHSYFSLTFCVQVQGKSKREKKDRVFTDKTSATVICRKNASISVRAQDRYYSSSWSEWASVPCSGGGGSGGGSGGGGSRNLPVATPDPGMFPCLHHSQNLLRAVSNMLQKARQTLEFYPCTSEEIDHEDITKDKTSTVEACLPLELTKNESCLNSRETSFITNGSCLASRKTSFMMALCLSSIYEDLKMYQVEFKTMNAKLLMDPKRQIFLDQNMLAVIDELMQALNFNSETVPQKSSLEEPDFYKTKIKLCILLHAFRIRAVTIDRVMSYLNASGGGGSGGGDKTHTCPPCPAPEDEGGPSVFLFPPKPKDTLMISRTPEVTCVVVDVSHEDPEVKFNWYVDGVEVHNAKTKPREEQYNSTYRVVSVLTVLHQDWLNGKEYKCKVSNKALPAPIEKTISKAKGQPREPQVYVYPPSREEMTKNQVSLTCLVKGFYPSDIAVEWESNGQPENNYKTTPPVLDEDGSFALVSKLTVDKSRWQQGNVFSCSVMHEALHNHYTQKSLSLSPGK

SEQ ID NO: 156 - protein, 980 aa, Homo sapiens
FTVTVPKDLYVVEYGSNMTIECKFPVEKQLDLAALQVYWMMEDKNIIQFVHGEEDLKVQHSSYRQRARLLKDQLSLGNAALQITDVKLQDAGVYTCLIAYGGADYKRITVKVNAPYNKINQRILVVDPVTSEHELTCQAEGYPKAEVIWTSSDHQVLSGKTTTTNSKREEKLFNVTSTLRINTTTNEIFYCTFRRLDPEENHTAELVIPELPLAHPPNERGGGGSGGGIWELKKDVYVVELDWYPDAPGEMVVLTCDTPEEDGITWTLDQSSEVLGSGKTLTIQVKAAGDAGQYTCHKGGEVLSHSLLLLHKKEDGIWSTDILKDQKEPKNKTFLRCEAKNYSGRFTCWWLTTISTDLTFSVKSSRGSSDPQGVTCGAATLSAERVRGDNKEYEYSVECQEDSACPAAEESLPIEVMVDAVHKLKYENYTSSFFIRDIIKPDPPKNLQLKPLKNSRQVEVSWEYPDTWSTPHSYFSLTFCVQVQGKSKREKKDRVFTDKTSATVICRKNASISVRAQDRYYSSSWSEWASVPCSGGGGSGGGSGGGGSRNLPVATPDPGMFPCLHHSQNLLRAVSNMLQKARQTLEFYPCTSEEIDHEDITKDKTSTVEACLPLELTKNESCLNSRETSFITNGSCLASRKTSFMMALCLSSIYEDLKMYQVEFKTMNAKLLMDPKRQIFLDQNMLAVIDELMQALNFNSETVPQKSSLEEPDFYKTKIKLCILLHAFRIRAVTIDRVMSYLNASGGGGSGGGDKTHTCPPCPAPEDEGGPSVFLFPPKPKDTLMISRTPEVTCVVVDVSHEDPEVKFNWYVDGVEVHNAKTKPREEQYNSTYRVVSVLTVLHQDWLNGKEYKCKVSNKALPAPIEKTISKAKGQPREPQVYVYPPSREEMTKNQVSLTCLVKGFYPSDIAVEWESNGQPENNYKTTPPVLDEDGSFALVSKLTVDKSRWQQGNVFSCSVMHEALHNHYTQKSLSLSPGK

SEQ ID NO: 157 - protein, 980 aa, Homo sapiens
FTVTVPKDLYVVEYGSNMTIECKFPVEKQLDLAALQVYWMMEDKNIIQFVHGEEDLKVQHSSYRQRARLLKDQLSLGNAALQITDVKLQDAGVYTCLIAYKGADYKRITVKVNAPYNKINQRILVVDPVTSEHELTCQAEGYPKAEVIWTSSDHQVLSGKTTTTNSKREEKLFNVTSTLRINTTTNEIFYCTFRRLDPEENHTAELVIPELPLAHPPNERGGGGSGGGDKTHTCPPCPAPEDEGGPSVFLFPPKPKDTLMISRTPEVTCVVVDVSHEDPEVKFNWYVDGVEVHNAKTKPREEQYNSTYRVVSVLTVLHQDWLNGKEYKCKVSNKALPAPIEKTISKAKGQPREPQVYVYPPSREEMTKNQVSLTCLVKGFYPSDIAVEWESNGQPENNYKTTPPVLDEDGSFALVSKLTVDKSRWQQGNVFSCSVMHEALHNHYTQKSLSLSPGKGGGGSGGGIWELKKDVYVVELDWYPDAPGEMVVLTCDTPEEDGITWTLDQSSEVLGSGKTLTIQVKAAGDAGQYTCHKGGEVLSHSLLLLHKKEDGIWSTDILKDQKEPKNKTFLRCEAKNYSGRFTCWWLTTISTDLTFSVKSSRGSSDPQGVTCGAATLSAERVRGDNKEYEYSVECQEDSACPAAEESLPIEVMVDAVHKLKYENYTSSFFIRDIIKPDPPKNLQLKPLKNSRQVEVSWEYPDTWSTPHSYFSLTFCVQVQGKSKREKKDRVFTDKTSATVICRKNASISVRAQDRYYSSSWSEWASVPCSGGGGSGGGSGGGGSRNLPVATPDPGMFPCLHHSQNLLRAVSNMLQKARQTLEFYPCTSEEIDHEDITKDKTSTVEACLPLELTKNESCLNSRETSFITNGSCLASRKTSFMMALCLSSIYEDLKMYQVEFKTMNAKLLMDPKRQIFLDQNMLAVIDELMQALNFNSETVPQKSSLEEPDFYKTKIKLCILLHAFRIRAVTIDRVMSYLNAS

SEQ ID NO: 158 - protein, 980 aa, Homo sapiens
FTVTVPKDLYVVEYGSNMTIECKFPVEKQLDLAALQVYWMMEDKNIIQFVHGEEDLKVQHSSYRQRARLLKDQLSLGNAALQITDVKLQDAGVYTCLIAYGGADYKRITVKVNAPYNKINQRILVVDPVTSEHELTCQAEGYPKAEVIWTSSDHQVLSGKTTTTNSKREEKLFNVTSTLRINTTTNEIFYCTFRRLDPEENHTAELVIPELPLAHPPNERGGGGSGGGDKTHTCPPCPAPEDEGGPSVFLFPPKPKDTLMISRTPEVTCVVVDVSHEDPEVKFNWYVDGVEVHNAKTKPREEQYNSTYRVVSVLTVLHQDWLNGKEYKCKVSNKALPAPIEKTISKAKGQPREPQVYVYPPSREEMTKNQVSLTCLVKGFYPSDIAVEWESNGQPENNYKTTPPVLDEDGSFALVSKLTVDKSRWQQGNVFSCSVMHEALHNHYTQKSLSLSPGKGGGGSGGGIWELKKDVYVVELDWYPDAPGEMVVLTCDTPEEDGITWTLDQSSEVLGSGKTLTIQVKAAGDAGQYTCHKGGEVLSHSLLLLHKKEDGIWSTDILKDQKEPKNKTFLRCEAKNYSGRFTCWWLTTISTDLTFSVKSSRGSSDPQGVTCGAATLSAERVRGDNKEYEYSVECQEDSACPAAEESLPIEVMVDAVHKLKYENYTSSFFIRDIIKPDPPKNLQLKPLKNSRQVEVSWEYPDTWSTPHSYFSLTFCVQVQGKSKREKKDRVFTDKTSATVICRKNASISVRAQDRYYSSSWSEWASVPCSGGGGSGGGSGGGGSRNLPVATPDPGMFPCLHHSQNLLRAVSNMLQKARQTLEFYPCTSEEIDHEDITKDKTSTVEACLPLELTKNESCLNSRETSFITNGSCLASRKTSFMMALCLSSIYEDLKMYQVEFKTMNAKLLMDPKRQIFLDQNMLAVIDELMQALNFNSETVPQKSSLEEPDFYKTKIKLCILLHAFRIRAVTIDRVMSYLNAS

SEQ ID NO: 159 - protein, 593 aa, Homo sapiens
FTVTVPKDLYVVEYGSNMTIECKFPVEKQLDLAALQVYWMMEDKNIIQFVHGEEDLKVQHSSYRQRARLLKDQLSLGNAALQITDVKLQDAGVYTCLIAYKGADYKRITVKVNAPYNKINQRILVVDPVTSEHELTCQAEGYPKAEVIWTSSDHQVLSGKTTTTNSKREEKLFNVTSTLRINTTTNEIFYCTFRRLDPEENHTAELVIPELPLAHPPNERGGGSGAPTSSSTKKTQLQLEHLRLDLEMILNGINNYKNPKLTDMLTFEFYMPKKATELKHLQCLERELKPLEEVLNLAQSKNFHLRPRDLISNINVIVLELKGSETTFMCEYADETATIVEFLNRWITFCQSIISTLTGGGGSGGGDKTHTCPPCPAPEKKGGPSVFLFPPKPKDTLMISRTPEVTCVVVDVSHEDPEVKFNWYVDGVEVHNAKTKPREEQYNSTYRVVSVLTVLHQDWLNGKEYKCKVSNKALPAPIEKTISKAKGQPREPQVYVLPPSREEMTKNQVSLLCLVKGFYPSDIAVEWESNGQPENRYMTWPPVLDSDGSFFLYSKLTVDKSRWQQGNVFSCSVMHEALHNHYTQKSLSLSPGK

SEQ ID NO: 160 - protein, 593 aa, Homo sapiens
FTVTVPKDLYVVEYGSNMTIECKFPVEKQLDLAALQVYWMMEDKNIIQFVHGEEDLKVQHSSYRQRARLLKDQLSLGNAALQITDVKLQDAGVYTCLIAYKGADYKRITVKVNAPYNKINQRILVVDPVTSEHELTCQAEGYPKAEVIWTSSDHQVLSGKTTTTNSKREEKLFNVTSTLRINTTTNEIFYCTFRRLDPEENHTAELVIPELPLAHPPNERGGGSGAPTSSSTKKTQLQLEHLLLDLQMILNGINNYKNPKLTDMLTFEFYMPKKATELKHLQCLERELKPLEEVLNLAQSKNFHLRPRDLISNINVIVLELKGSETTFMCEYADETATIVEFLNRWITFCTSIISTLTGGGGSGGGDKTHTCPPCPAPEKKGGPSVFLFPPKPKDTLMISRTPEVTCVVVDVSHEDPEVKFNWYVDGVEVHNAKTKPREEQYNSTYRVVSVLTVLHQDWLNGKEYKCKVSNKALPAPIEKTISKAKGQPREPQVYVLPPSREEMTKNQVSLLCLVKGFYPSDIAVEWESNGQPENRYMTWPPVLDSDGSFFLYSKLTVDKSRWQQGNVFSCSVMHEALHNHYTQKSLSLSPGK

SEQ ID NO: 161 - protein, 593 aa, Homo sapiens
FTVTVPKDLYVVEYGSNMTIECKFPVEKQLDLAALQVYWMMEDKNIIQFVHGEEDLKVQHSSYRQRARLLKDQLSLGNAALQITDVKLQDAGVYTCLIAYKGADYKRITVKVNAPYNKINQRILVVDPVTSEHELTCQAEGYPKAEVIWTSSDHQVLSGKTTTTNSKREEKLFNVTSTLRINTTTNEIFYCTFRRLDPEENHTAELVIPELPLAHPPNERGGGSGAPTSSSTKKTQLQLEHLRLDLEMILNGINNYKNPKLTDMLTFEFYMPKKATELKHLQCLERELKPLEEVLNLAQSKNFHLRPRDLISNINVIVLELKGSETTFMCEYADETATIVEFLNRWITFCTSIISTLTGGGGSGGGDKTHTCPPCPAPEKKGGPSVFLFPPKPKDTLMISRTPEVTCVVVDVSHEDPEVKFNWYVDGVEVHNAKTKPREEQYNSTYRVVSVLTVLHQDWLNGKEYKCKVSNKALPAPIEKTISKAKGQPREPQVYVLPPSREEMTKNQVSLLCLVKGFYPSDIAVEWESNGQPENRYMTWPPVLDSDGSFFLYSKLTVDKSRWQQGNVFSCSVMHEALHNHYTQKSLSLSPGK

SEQ ID NO: 162 - protein, 593 aa, Homo sapiens
FTVTVPKDLYVVEYGSNMTIECKFPVEKQLDLAALQVYWMMEDKNIIQFVHGEEDLKVQHSSYRQRARLLKDQLSLGNAALQITDVKLQDAGVYTCLIAYKGADYKRITVKVNAPYNKINQRILVVDPVTSEHELTCQAEGYPKAEVIWTSSDHQVLSGKTTTTNSKREEKLFNVTSTLRINTTTNEIFYCTFRRLDPEENHTAELVIPELPLAHPPNERGGGSGAPTSSSTKKTQLQLEHLRLDLEMILNGINNYKNPKLTDMLTFEFYMPKKATELKHLQCLERELKPLEEVLNLAQSKNFHLRPRDLISNINVIVLELKGSETTFMCEYADETATIVEFLNRWITFCTSIIRTLTGGGGSGGGDKTHTCPPCPAPEKKGGPSVFLFPPKPKDTLMISRTPEVTCVVVDVSHEDPEVKFNWYVDGVEVHNAKTKPREEQYNSTYRVVSVLTVLHQDWLNGKEYKCKVSNKALPAPIEKTISKAKGQPREPQVYVLPPSREEMTKNQVSLLCLVKGFYPSDIAVEWESNGQPENRYMTWPPVLDSDGSFFLYSKLTVDKSRWQQGNVFSCSVMHEALHNHYTQKSLSLSPGK

SEQ ID NO: 163 - protein, 593 aa, Homo sapiens
FTVTVPKDLYVVEYGSNMTIECKFPVEKQLDLAALQVYWMMEDKNIIQFVHGEEDLKVQHSSYRQRARLLKDQLSLGNAALQITDVKLQDAGVYTCLIAYGGADYKRITVKVNAPYNKINQRILVVDPVTSEHELTCQAEGYPKAEVIWTSSDHQVLSGKTTTTNSKREEKLFNVTSTLRINTTTNEIFYCTFRRLDPEENHTAELVIPELPLAHPPNERGGGSGAPTSSSTKKTQLQLEHLRLDLEMILNGINNYKNPKLTDMLTFEFYMPKKATELKHLQCLERELKPLEEVLNLAQSKNFHLRPRDLISNINVIVLELKGSETTFMCEYADETATIVEFLNRWITFCQSIISTLTGGGGSGGGDKTHTCPPCPAPEKKGGPSVFLFPPKPKDTLMISRTPEVTCVVVDVSHEDPEVKFNWYVDGVEVHNAKTKPREEQYNSTYRVVSVLTVLHQDWLNGKEYKCKVSNKALPAPIEKTISKAKGQPREPQVYVLPPSREEMTKNQVSLLCLVKGFYPSDIAVEWESNGQPENRYMTWPPVLDSDGSFFLYSKLTVDKSRWQQGNVFSCSVMHEALHNHYTQKSLSLSPGK

SEQ ID NO: 164 - protein, 593 aa, Homo sapiens
FTVTVPKDLYVVEYGSNMTIECKFPVEKQLDLAALQVYWMMEDKNIIQFVHGEEDLKVQHSSYRQRARLLKDQLSLGNAALQITDVKLQDAGVYTCLIAYGGADYKRITVKVNAPYNKINQRILVVDPVTSEHELTCQAEGYPKAEVIWTSSDHQVLSGKTTTTNSKREEKLFNVTSTLRINTTTNEIFYCTFRRLDPEENHTAELVIPELPLAHPPNERGGGSGAPTSSSTKKTQLQLEHLLLDLQMILNGINNYKNPKLTDMLTFEFYMPKKATELKHLQCLERELKPLEEVLNLAQSKNFHLRPRDLISNINVIVLELKGSETTFMCEYADETATIVEFLNRWITFCTSIISTLTGGGGSGGGDKTHTCPPCPAPEKKGGPSVFLFPPKPKDTLMISRTPEVTCVVVDVSHEDPEVKFNWYVDGVEVHNAKTKPREEQYNSTYRVVSVLTVLHQDWLNGKEYKCKVSNKALPAPIEKTISKAKGQPREPQVYVLPPSREEMTKNQVSLLCLVKGFYPSDIAVEWESNGQPENRYMTWPPVLDSDGSFFLYSKLTVDKSRWQQGNVFSCSVMHEALHNHYTQKSLSLSPGK

SEQ ID NO: 165 - protein, 593 aa, Homo sapiens
FTVTVPKDLYVVEYGSNMTIECKFPVEKQLDLAALQVYWMMEDKNIIQFVHGEEDLKVQHSSYRQRARLLKDQLSLGNAALQITDVKLQDAGVYTCLIAYGGADYKRITVKVNAPYNKINQRILVVDPVTSEHELTCQAEGYPKAEVIWTSSDHQVLSGKTTTTNSKREEKLFNVTSTLRINTTTNEIFYCTFRRLDPEENHTAELVIPELPLAHPPNERGGGSGAPTSSSTKKTQLQLEHLRLDLEMILNGINNYKNPKLTDMLTFEFYMPKKATELKHLQCLERELKPLEEVLNLAQSKNFHLRPRDLISNINVIVLELKGSETTFMCEYADETATIVEFLNRWITFCTSIISTLTGGGGSGGGDKTHTCPPCPAPEKKGGPSVFLFPPKPKDTLMISRTPEVTCVVVDVSHEDPEVKFNWYVDGVEVHNAKTKPREEQYNSTYRVVSVLTVLHQDWLNGKEYKCKVSNKALPAPIEKTISKAKGQPREPQVYVLPPSREEMTKNQVSLLCLVKGFYPSDIAVEWESNGQPENRYMTWPPVLDSDGSFFLYSKLTVDKSRWQQGNVFSCSVMHEALHNHYTQKSLSLSPGK

SEQ ID NO: 166 - protein, 593 aa, Homo sapiens
FTVTVPKDLYVVEYGSNMTIECKFPVEKQLDLAALQVYWMMEDKNIIQFVHGEEDLKVQHSSYRQRARLLKDQLSLGNAALQITDVKLQDAGVYTCLIAYGGADYKRITVKVNAPYNKINQRILVVDPVTSEHELTCQAEGYPKAEVIWTSSDHQVLSGKTTTTNSKREEKLFNVTSTLRINTTTNEIFYCTFRRLDPEENHTAELVIPELPLAHPPNERGGGSGAPTSSSTKKTQLQLEHLRLDLEMILNGINNYKNPKLTDMLTFEFYMPKKATELKHLQCLERELKPLEEVLNLAQSKNFHLRPRDLISNINVIVLELKGSETTFMCEYADETATIVEFLNRWITFCTSIIRTLTGGGGSGGGDKTHTCPPCPAPEKKGGPSVFLFPPKPKDTLMISRTPEVTCVVVDVSHEDPEVKFNWYVDGVEVHNAKTKPREEQYNSTYRVVSVLTVLHQDWLNGKEYKCKVSNKALPAPIEKTISKAKGQPREPQVYVLPPSREEMTKNQVSLLCLVKGFYPSDIAVEWESNGQPENRYMTWPPVLDSDGSFFLYSKLTVDKSRWQQGNVFSCSVMHEALHNHYTQKSLSLSPGK

SEQ ID NO: 167 - protein, 961 aa, Homo sapiens
LFTVTVPKELYIIEHGSNVTLECNFDTGSHVNLGAITAVLQKVENDTSPHRERATLLEEQLPLGKASFHIPQVQVRDEGQYQCIIIYGVAWDYKYLTLKVKASYRKINTHILKVPETDEVELTCQATGYPLAEVSWPNVSVPANTSHSRTPEGLYQVTSVLRLKPPPGRNFSCVFWNTHVRELTLASIDLQSQMEPRTHPTGGGGSGGGIWELKKDVYVVELDWYPDAPGEMVVLTCDTPEEDGITWTLDQSSEVLGSGKTLTIQVKAAGDAGQYTCHKGGEVLSHSLLLLHKKEDGIWSTDILKDQKEPKNKTFLRCEAKNYSGRFTCWWLTTISTDLTFSVKSSRGSSDPQGVTCGAATLSAERVRGDNKEYEYSVECQEDSACPAAEESLPIEVMVDAVHKLKYENYTSSFFIRDIIKPDPPKNLQLKPLKNSRQVEVSWEYPDTWSTPHSYFSLTFCVQVQGKSKREKKDRVFTDKTSATVICRKNASISVRAQDRYYSSSWSEWASVPCSGGGGSGGGSGGGGSRNLPVATPDPGMFPCLHHSQNLLRAVSNMLQKARQTLEFYPCTSEEIDHEDITKDKTSTVEACLPLELTKNESCLNSRETSFITNGSCLASRKTSFMMALCLSSIYEDLKMYQVEFKTMNAKLLMDPKRQIFLDQNMLAVIDELMQALNFNSETVPQKSSLEEPDFYKTKIKLCILLHAFRIRAVTIDRVMSYLNASGGGGSGGGDKTHTCPPCPAPEDEGGPSVFLFPPKPKDTLMISRTPEVTCVVVDVSHEDPEVKFNWYVDGVEVHNAKTKPREEQYNSTYRVVSVLTVLHQDWLNGKEYKCKVSNKALPAPIEKTISKAKGQPREPQVYVYPPSREEMTKNQVSLTCLVKGFYPSDIAVEWESNGQPENNYKTTPPVLDEDGSFALVSKLTVDKSRWQQGNVFSCSVMHEALHNHYTQKSLSLSPGK

SEQ ID NO: 168 - protein, 961 aa, Homo sapiens
LFTVTVPKELYIIEHGSNVTLECNFDTGSHVNLGAIVAVLLKVENDTSPHRERATLLEEQLPLGKASFHIPQVQVRDEGQYQCIIIYGVAWDYKYLTLKVKASYRKINTHILKVPETDEVELTCQATGYPLAEVSWPNVSVPANTSHSRTPEGLYQVTSVLRLKPPPGRNFSCVFWNTHVRELTLASIDLQSQMEPRTHPTGGGGSGGGIWELKKDVYVVELDWYPDAPGEMVVLTCDTPEEDGITWTLDQSSEVLGSGKTLTIQVKAAGDAGQYTCHKGGEVLSHSLLLLHKKEDGIWSTDILKDQKEPKNKTFLRCEAKNYSGRFTCWWLTTISTDLTFSVKSSRGSSDPQGVTCGAATLSAERVRGDNKEYEYSVECQEDSACPAAEESLPIEVMVDAVHKLKYENYTSSFFIRDIIKPDPPKNLQLKPLKNSRQVEVSWEYPDTWSTPHSYFSLTFCVQVQGKSKREKKDRVFTDKTSATVICRKNASISVRAQDRYYSSSWSEWASVPCSGGGGSGGGSGGGGSRNLPVATPDPGMFPCLHHSQNLLRAVSNMLQKARQTLEFYPCTSEEIDHEDITKDKTSTVEACLPLELTKNESCLNSRETSFITNGSCLASRKTSFMMALCLSSIYEDLKMYQVEFKTMNAKLLMDPKRQIFLDQNMLAVIDELMQALNFNSETVPQKSSLEEPDFYKTKIKLCILLHAFRIRAVTIDRVMSYLNASGGGGSGGGDKTHTCPPCPAPEDEGGPSVFLFPPKPKDTLMISRTPEVTCVVVDVSHEDPEVKFNWYVDGVEVHNAKTKPREEQYNSTYRVVSVLTVLHQDWLNGKEYKCKVSNKALPAPIEKTISKAKGQPREPQVYVYPPSREEMTKNQVSLTCLVKGFYPSDIAVEWESNGQPENNYKTTPPVLDEDGSFALVSKLTVDKSRWQQGNVFSCSVMHEALHNHYTQKSLSLSPGK

SEQ ID NO: 169 - protein, 961 aa, Homo sapiens
LFTVTVPKELYIIEHGSNVTLECNFDTGSHVNLGAITAVLQKVENDTSPHRERATLLEEQLPLGKASFHIPQVQVRDEGQYQCIIIYGVAWDYKYLTLKVKASYRKINTHILKVPETDEVELTCQATGYPLAEVSWPNVSVPANTSHSRTPEGLYQVTSVLRLKPPPGRNFSCVFWNTHVRELTLASIDLQSQMEPRTHPTGGGGSGGGDKTHTCPPCPAPEDEGGPSVFLFPPKPKDTLMISRTPEVTCVVVDVSHEDPEVKFNWYVDGVEVHNAKTKPREEQYNSTYRVVSVLTVLHQDWLNGKEYKCKVSNKALPAPIEKTISKAKGQPREPQVYVYPPSREEMTKNQVSLTCLVKGFYPSDIAVEWESNGQPENNYKTTPPVLDEDGSFALVSKLTVDKSRWQQGNVFSCSVMHEALHNHYTQKSLSLSPGKGGGGSGGGIWELKKDVYVVELDWYPDAPGEMVVLTCDTPEEDGITWTLDQSSEVLGSGKTLTIQVKAAGDAGQYTCHKGGEVLSHSLLLLHKKEDGIWSTDILKDQKEPKNKTFLRCEAKNYSGRFTCWWLTTISTDLTFSVKSSRGSSDPQGVTCGAATLSAERVRGDNKEYEYSVECQEDSACPAAEESLPIEVMVDAVHKLKYENYTSSFFIRDIIKPDPPKNLQLKPLKNSRQVEVSWEYPDTWSTPHSYFSLTFCVQVQGKSKREKKDRVFTDKTSATVICRKNASISVRAQDRYYSSSWSEWASVPCSGGGGSGGGSGGGGSRNLPVATPDPGMFPCLHHSQNLLRAVSNMLQKARQTLEFYPCTSEEIDHEDITKDKTSTVEACLPLELTKNESCLNSRETSFITNGSCLASRKTSFMMALCLSSIYEDLKMYQVEFKTMNAKLLMDPKRQIFLDQNMLAVIDELMQALNFNSETVPQKSSLEEPDFYKTKIKLCILLHAFRIRAVTIDRVMSYLNAS

SEQ ID NO: 170 - protein, 961 aa, Homo sapiens
LFTVTVPKELYIIEHGSNVTLECNFDTGSHVNLGAIVAVLLKVENDTSPHRERATLLEEQLPLGKASFHIPQVQVRDEGQYQCIIIYGVAWDYKYLTLKVKASYRKINTHILKVPETDEVELTCQATGYPLAEVSWPNVSVPANTSHSRTPEGLYQVTSVLRLKPPPGRNFSCVFWNTHVRELTLASIDLQSQMEPRTHPTGGGGSGGGDKTHTCPPCPAPEDEGGPSVFLFPPKPKDTLMISRTPEVTCVVVDVSHEDPEVKFNWYVDGVEVHNAKTKPREEQYNSTYRVVSVLTVLHQDWLNGKEYKCKVSNKALPAPIEKTISKAKGQPREPQVYVYPPSREEMTKNQVSLTCLVKGFYPSDIAVEWESNGQPENNYKTTPPVLDEDGSFALVSKLTVDKSRWQQGNVFSCSVMHEALHNHYTQKSLSLSPGKGGGGSGGGIWELKKDVYVVELDWYPDAPGEMVVLTCDTPEEDGITWTLDQSSEVLGSGKTLTIQVKAAGDAGQYTCHKGGEVLSHSLLLLHKKEDGIWSTDILKDQKEPKNKTFLRCEAKNYSGRFTCWWLTTISTDLTFSVKSSRGSSDPQGVTCGAATLSAERVRGDNKEYEYSVECQEDSACPAAEESLPIEVMVDAVHKLKYENYTSSFFIRDIIKPDPPKNLQLKPLKNSRQVEVSWEYPDTWSTPHSYFSLTFCVQVQGKSKREKKDRVFTDKTSATVICRKNASISVRAQDRYYSSSWSEWASVPCSGGGGSGGGSGGGGSRNLPVATPDPGMFPCLHHSQNLLRAVSNMLQKARQTLEFYPCTSEEIDHEDITKDKTSTVEACLPLELTKNESCLNSRETSFITNGSCLASRKTSFMMALCLSSIYEDLKMYQVEFKTMNAKLLMDPKRQIFLDQNMLAVIDELMQALNFNSETVPQKSSLEEPDFYKTKIKLCILLHAFRIRAVTIDRVMSYLNAS

SEQ ID NO: 171 - protein, 574 aa, Homo sapiens
LFTVTVPKELYIIEHGSNVTLECNFDTGSHVNLGAITAVLQKVENDTSPHRERATLLEEQLPLGKASFHIPQVQVRDEGQYQCIIIYGVAWDYKYLTLKVKASYRKINTHILKVPETDEVELTCQATGYPLAEVSWPNVSVPANTSHSRTPEGLYQVTSVLRLKPPPGRNFSCVFWNTHVRELTLASIDLQSQMEPRTHPTGGGSGAPTSSSTKKTQLQLEHLRLDLEMILNGINNYKNPKLTDMLTFEFYMPKKATELKHLQCLERELKPLEEVLNLAQSKNFHLRPRDLISNINVIVLELKGSETTFMCEYADETATIVEFLNRWITFCQSIISTLTGGGGSGGGDKTHTCPPCPAPEKKGGPSVFLFPPKPKDTLMISRTPEVTCVVVDVSHEDPEVKFNWYVDGVEVHNAKTKPREEQYNSTYRVVSVLTVLHQDWLNGKEYKCKVSNKALPAPIEKTISKAKGQPREPQVYVLPPSREEMTKNQVSLLCLVKGFYPSDIAVEWESNGQPENRYMTWPPVLDSDGSFFLYSKLTVDKSRWQQGNVFSCSVMHEALHNHYTQKSLSLSPGK

SEQ ID NO: 172 - protein, 573 aa, Homo sapiens
LFTVTVPKELYIIEHGSNVTLECNFDTGSHVNLGAITAVLQKVENDTSPHRERATLLEEQLPLGKASFHIPQVQVRDEGQYQCIIIYGVAWDYKYLTLKVKASYRKINTHILKVPETDEVELTCQATGYPLAEVSWPNVSVPANTSHSRTPEGLYQVTSLRLKPPPGRNFSCVFWNTHVRELTLASIDLQSQMEPRTHPTGGGSGAPTSSSTKKTQLQLEHLLLDLQMILNGINNYKNPKLTDMLTFEFYMPKKATELKHLQCLERELKPLEEVLNLAQSKNFHLRPRDLISNINVIVLELKGSETTFMCEYADETATIVEFLNRWITFCTSIISTLTGGGGSGGGDKTHTCPPCPAPEKKGGPSVFLFPPKPKDTLMISRTPEVTCVVVDVSHEDPEVKFNWYVDGVEVHNAKTKPREEQYNSTYRVVSVLTVLHQDWLNGKEYKCKVSNKALPAPIEKTISKAKGQPREPQVYVLPPSREEMTKNQVSLLCLVKGFYPSDIAVEWESNGQPENRYMTWPPVLDSDGSFFLYSKLTVDKSRWQQGNVFSCSVMHEALHNHYTQKSLSLSPGK

SEQ ID NO: 173 - protein, 573 aa, Homo sapiens
LFTVTVPKELYIIEHGSNVTLECNFDTGSHVNLGAITAVLQKVENDTSPHRERATLLEEQLPLGKASFHIPQVQVRDEGQYQCIIIYGVAWDYKYLTLKVKASYRKINTHILKVPETDEVELTCQATGYPLAEVSWPNVSVPANTSHSRTPEGLYQVTSLRLKPPPGRNFSCVFWNTHVRELTLASIDLQSQMEPRTHPTGGGSGAPTSSSTKKTQLQLEHLRLDLEMILNGINNYKNPKLTDMLTFEFYMPKKATELKHLQCLERELKPLEEVLNLAQSKNFHLRPRDLISNINVIVLELKGSETTFMCEYADETATIVEFLNRWITFCTSIISTLTGGGGSGGGDKTHTCPPCPAPEKKGGPSVFLFPPKPKDTLMISRTPEVTCVVVDVSHEDPEVKFNWYVDGVEVHNAKTKPREEQYNSTYRVVSVLTVLHQDWLNGKEYKCKVSNKALPAPIEKTISKAKGQPREPQVYVLPPSREEMTKNQVSLLCLVKGFYPSDIAVEWESNGQPENRYMTWPPVLDSDGSFFLYSKLTVDKSRWQQGNVFSCSVMHEALHNHYTQKSLSLSPGK

SEQ ID NO: 174 - protein, 573 aa, Homo sapiens
LFTVTVPKELYIIEHGSNVTLECNFDTGSHVNLGAITAVLQKVENDTSPHRERATLLEEQLPLGKASFHIPQVQVRDEGQYQCIIIYGVAWDYKYLTLKVKASYRKINTHILKVPETDEVELTCQATGYPLAEVSWPNVSVPANTSHSRTPEGLYQVTSLRLKPPPGRNFSCVFWNTHVRELTLASIDLQSQMEPRTHPTGGGSGAPTSSSTKKTQLQLEHLRLDLEMILNGINNYKNPKLTDMLTFEFYMPKKATELKHLQCLERELKPLEEVLNLAQSKNFHLRPRDLISNINVIVLELKGSETTFMCEYADETATIVEFLNRWITFCTSIIRTLTGGGGSGGGDKTHTCPPCPAPEKKGGPSVFLFPPKPKDTLMISRTPEVTCVVVDVSHEDPEVKFNWYVDGVEVHNAKTKPREEQYNSTYRVVSVLTVLHQDWLNGKEYKCKVSNKALPAPIEKTISKAKGQPREPQVYVLPPSREEMTKNQVSLLCLVKGFYPSDIAVEWESNGQPENRYMTWPPVLDSDGSFFLYSKLTVDKSRWQQGNVFSCSVMHEALHNHYTQKSLSLSPGK

SEQ ID NO: 175 - protein, 574 aa, Homo sapiens
LFTVTVPKELYIIEHGSNVTLECNFDTGSHVNLGAIVAVLLKVENDTSPHRERATLLEEQLPLGKASFHIPQVQVRDEGQYQCIIIYGVAWDYKYLTLKVKASYRKINTHILKVPETDEVELTCQATGYPLAEVSWPNVSVPANTSHSRTPEGLYQVTSVLRLKPPPGRNFSCVFWNTHVRELTLASIDLQSQMEPRTHPTGGGSGAPTSSSTKKTQLQLEHLRLDLEMILNGINNYKNPKLTDMLTFEFYMPKKATELKHLQCLERELKPLEEVLNLAQSKNFHLRPRDLISNINVIVLELKGSETTFMCEYADETATIVEFLNRWITFCQSIISTLTGGGGSGGGDKTHTCPPCPAPEKKGGPSVFLFPPKPKDTLMISRTPEVTCVVVDVSHEDPEVKFNWYVDGVEVHNAKTKPREEQYNSTYRVVSVLTVLHQDWLNGKEYKCKVSNKALPAPIEKTISKAKGQPREPQVYVLPPSREEMTKNQVSLLCLVKGFYPSDIAVEWESNGQPENRYMTWPPVLDSDGSFFLYSKLTVDKSRWQQGNVFSCSVMHEALHNHYTQKSLSLSPGK

SEQ ID NO: 176 - protein, 574 aa, Homo sapiens
LFTVTVPKELYIIEHGSNVTLECNFDTGSHVNLGAIVAVLLKVENDTSPHRERATLLEEQLPLGKASFHIPQVQVRDEGQYQCIIIYGVAWDYKYLTLKVKASYRKINTHILKVPETDEVELTCQATGYPLAEVSWPNVSVPANTSHSRTPEGLYQVTSVLRLKPPPGRNFSCVFWNTHVRELTLASIDLQSQMEPRTHPTGGGSGAPTSSSTKKTQLQLEHLLLDLQMILNGINNYKNPKLTDMLTFEFYMPKKATELKHLQCLERELKPLEEVLNLAQSKNFHLRPRDLISNINVIVLELKGSETTFMCEYADETATIVEFLNRWITFCTSIISTLTGGGGSGGGDKTHTCPPCPAPEKKGGPSVFLFPPKPKDTLMISRTPEVTCVVVDVSHEDPEVKFNWYVDGVEVHNAKTKPREEQYNSTYRVVSVLTVLHQDWLNGKEYKCKVSNKALPAPIEKTISKAKGQPREPQVYVLPPSREEMTKNQVSLLCLVKGFYPSDIAVEWESNGQPENRYMTWPPVLDSDGSFFLYSKLTVDKSRWQQGNVFSCSVMHEALHNHYTQKSLSLSPGK

SEQ ID NO: 177 - protein, 574 aa, Homo sapiens
LFTVTVPKELYIIEHGSNVTLECNFDTGSHVNLGAIVAVLLKVENDTSPHRERATLLEEQLPLGKASFHIPQVQVRDEGQYQCIIIYGVAWDYKYLTLKVKASYRKINTHILKVPETDEVELTCQATGYPLAEVSWPNVSVPANTSHSRTPEGLYQVTSVLRLKPPPGRNFSCVFWNTHVRELTLASIDLQSQMEPRTHPTGGGSGAPTSSSTKKTQLQLEHLRLDLEMILNGINNYKNPKLTDMLTFEFYMPKKATELKHLQCLERELKPLEEVLNLAQSKNFHLRPRDLISNINVIVLELKGSETTFMCEYADETATIVEFLNRWITFCTSIISTLTGGGGSGGGDKTHTCPPCPAPEKKGGPSVFLFPPKPKDTLMISRTPEVTCVVVDVSHEDPEVKFNWYVDGVEVHNAKTKPREEQYNSTYRVVSVLTVLHQDWLNGKEYKCKVSNKALPAPIEKTISKAKGQPREPQVYVLPPSREEMTKNQVSLLCLVKGFYPSDIAVEWESNGQPENRYMTWPPVLDSDGSFFLYSKLTVDKSRWQQGNVFSCSVMHEALHNHYTQKSLSLSPGK

SEQ ID NO: 178 - protein, 574 aa, Homo sapiens
LFTVTVPKELYIIEHGSNVTLECNFDTGSHVNLGAIVAVLLKVENDTSPHRERATLLEEQLPLGKASFHIPQVQVRDEGQYQCIIIYGVAWDYKYLTLKVKASYRKINTHILKVPETDEVELTCQATGYPLAEVSWPNVSVPANTSHSRTPEGLYQVTSVLRLKPPPGRNFSCVFWNTHVRELTLASIDLQSQMEPRTHPTGGGSGAPTSSSTKKTQLQLEHLRLDLEMILNGINNYKNPKLTDMLTFEFYMPKKATELKHLQCLERELKPLEEVLNLAQSKNFHLRPRDLISNINVIVLELKGSETTFMCEYADETATIVEFLNRWITFCTSIIRTLTGGGGSGGGDKTHTCPPCPAPEKKGGPSVFLFPPKPKDTLMISRTPEVTCVVVDVSHEDPEVKFNWYVDGVEVHNAKTKPREEQYNSTYRVVSVLTVLHQDWLNGKEYKCKVSNKALPAPIEKTISKAKGQPREPQVYVLPPSREEMTKNQVSLLCLVKGFYPSDIAVEWESNGQPENRYMTWPPVLDSDGSFFLYSKLTVDKSRWQQGNVFSCSVMHEALHNHYTQKSLSLSPGK

SEQ ID NO: 179 - protein, 593 aa, Homo sapiens
FTVTVPKDLYVVEYGSNMTIECKFPVEKQLDLAALQVYWMMEDKNIIQFVHGEEDLKVQHSSYRQRARLLKDQLSLGNAALQITDVKLQDAGVYTCLIAYKGADYKRITVKVNAPYNKINQRILVVDPVTSEHELTCQAEGYPKAEVIWTSSDHQVLSGKTTTTNSKREEKLFNVTSTLRINTTTNEIFYCTFRRLDPEENHTAELVIPELPLAHPPNERGGGSGAPTSSSTKKTQLQLEHLLLDLQMILNGINNYKNPKLTDMLTFEFYMPKKATELKHLQCLERELKPLEEVLNLAQSKNFHLRPRDLISNINVIVLELKGSETTFMCEYADETATIVEFLNRWITFCQSIISTLTGGGGSGGGDKTHTCPPCPAPEKKGGPSVFLFPPKPKDTLMISRTPEVTCVVVDVSHEDPEVKFNWYVDGVEVHNAKTKPREEQYNSTYRVVSVLTVLHQDWLNGKEYKCKVSNKALPAPIEKTISKAKGQPREPQVYVLPPSREEMTKNQVSLLCLVKGFYPSDIAVEWESNGQPENRYMTWPPVLDSDGSFFLYSKLTVDKSRWQQGNVFSCSVMHEALHNHYTQKSLSLSPGK

SEQ ID NO: 180 - protein, 987 aa, Homo sapiens
FTVTVPKDLYVVEYGSNMTIECKFPVEKQLDLAALQVYWMMEDKNIIQFVHGEEDLKVQHSSYRQRARLLKDQLSLGNAALQITDVKLQDAGVYTCLIAYKGADYKRITVKVNAPYNKINQRILVVDPVTSEHELTCQAEGYPKAEVIWTSSDHQVLSGKTTTTNSKREEKLFNVTSTLRINTTTNEIFYCTFRRLDPEENHTAELVIPELPLAHPPNERGGGGSGGGMWELEKDVYVVEVDWTPDAPGETVNLTCDTPEEDDITWTSDQRHGVIGSGKTLTITVKAALDAGQYTCHKGGETLSHSHLLLHKKENGIWSTEILKNFKNKTFLKCEAPNYSGRFTCSWLVQRNMDLKFNIKSSSSSPDSRAVTCGMASLSAEKVTLDQRDYEKYSVSCQEDVTCPTAEETLPIELALEARQQNKYENYSTSFFIRDIIKPDPPKNLQMKPLKNSQVEVSWEYPDSWSTPHSYFSLKFFVRIQRKKEKMKETEEGCNQKGAFLVEKTSTEVQCKGGNVCVQAQDRYYNSSCSKWACVPCRVRSGGPGGGGSGGGSGGGGSGRVIPVSGPARCLSQSRNLLKTTDDMVKTAREKLKHYSCTAEDIDHEDITRDQTSTLKTCLPLELHKNESCLATRETSSTTRGSCLPPQKTSLMMTLCLGSIYEDLKMYQTEFQAINAALQNHNHQQIILDKGMLVAIDELMQSLNHNGETLRQKPPVGEADPYRVKMKLCILLHAFSTRVVTINRVMGYLSSAGGGGSGGGDKTHTCPPCPAPEDEGGPSVFLFPPKPKDTLMISRTPEVTCVVVDVSHEDPEVKFNWYVDGVEVHNAKTKPREEQYNSTYRVVSVLTVLHQDWLNGKEYKCKVSNKALPAPIEKTISKAKGQPREPQVYVYPPSREEMTKNQVSLTCLVKGFYPSDIAVEWESNGQPENNYKTTPPVLDEDGSFALVSKLTVDKSRWQQGNVFSCSVMHEALHNHYTQKSLSLSPGK

SEQ ID NO: 181 - protein, 987 aa, Homo sapiens
FTVTVPKDLYVVEYGSNMTIECKFPVEKQLDLAALQVYWMMEDKNIIQFVHGEEDLKVQHSSYRQRARLLKDQLSLGNAALQITDVKLQDAGVYTCLIAYKGADYKRITVKVNAPYNKINQRILVVDPVTSEHELTCQAEGYPKAEVIWTSSDHQVLSGKTTTTNSKREEKLFNVTSTLRINTTTNEIFYCTFRRLDPEENHTAELVIPELPLAHPPNERGGGGSGGGDKTHTCPPCPAPEDEGGPSVFLFPPKPKDTLMISRTPEVTCVVVDVSHEDPEVKFNWYVDGVEVHNAKTKPREEQYNSTYRVVSVLTVLHQDWLNGKEYKCKVSNKALPAPIEKTISKAKGQPREPQVYVYPPSREEMTKNQVSLTCLVKGFYPSDIAVEWESNGQPENNYKTTPPVLDEDGSFALVSKLTVDKSRWQQGNVFSCSVMHEALHNHYTQKSLSLSPGKGGGGSGGGMWELEKDVYVVEVDWTPDAPGETVNLTCDTPEEDDITWTSDQRHGVIGSGKTLTITVKAALDAGQYTCHKGGETLSHSHLLLHKKENGIWSTEILKNFKNKTFLKCEAPNYSGRFTCSWLVQRNMDLKFNIKSSSSSPDSRAVTCGMASLSAEKVTLDQRDYEKYSVSCQEDVTCPTAEETLPIELALEARQQNKYENYSTSFFIRDIIKPDPPKNLQMKPLKNSQVEVSWEYPDSWSTPHSYFSLKFFVRIQRKKEKMKETEEGCNQKGAFLVEKTSTEVQCKGGNVCVQAQDRYYNSSCSKWACVPCRVRSGGPGGGGSGGGSGGGGSGRVIPVSGPARCLSQSRNLLKTTDDMVKTAREKLKHYSCTAEDIDHEDITRDQTSTLKTCLPLELHKNESCLATRETSSTTRGSCLPPQKTSLMMTLCLGSIYEDLKMYQTEFQAINAALQNHNHQQIILDKGMLVAIDELMQSLNHNGETLRQKPPVGEADPYRVKMKLCILLHAFSTRVVTINRVMGYLSSA

SEQ ID NO: 182 - protein, 758 aa, Homo sapiens
FTVTVPKDLYVVEYGSNMTIECKFPVEKQLDLAALQVYWMMEDKNIIQFVHGEEDLKVQHSSYRQRARLLKDQLSLGNAALQITDVKLQDAGVYTCLIAYKGADYKRITVKVNAPYNKINQRILVVDPVTSEHELTCQAEGYPKAEVIWTSSDHQVLSGKTTTTNSKREEKLFNVTSTLRINTTTNEIFYCTFRRLDPEENHTAELVIPELPLAHPPNERGGGGSGGGQDPYVKEAENLKKYFNAGHSDVVDNGTLFLGILKNWKEESDRKIMQSQIVSFYFKLFKNFKDDQSIQKSVETIKEDMNVKFFNSNKKKRDDFEKLTNYSVTDLNVQRKAIHELIQVMAELSPAAKTGKRKRSQMLFRGGGGSGGGGSGGGGSGGGGSQDPYVKEAENLKKYFNAGHSDVVDNGTLFLGILKNWKEESDRKIMQSQIVSFYFKLFKNFKDDQSIQKSVETIKEDMNVKFFNSNKKKRDDFEKLTNYSVTDLNVQRKAIHELIQVMAELSPAAKTGKRKRSQMLFRGGGGGSGGGDKTHTCPPCPAPEDEGGPSVFLFPPKPKDTLMISRTPEVTCVVVDVSHEDPEVKFNWYVDGVEVHNAKTKPREEQYNSTYRVVSVLTVLHQDWLNGKEYKCKVSNKALPAPIEKTISKAKGQPREPQVYVYPPSREEMTKNQVSLTCLVKGFYPSDIAVEWESNGQPENNYKTTPPVLDEDGSFALVSKLTVDKSRWQQGNVFSCSVMHEALHNHYTQKSLSLSPGK

SEQ ID NO: 183 - protein, 758 aa, Homo sapiens
FTVTVPKDLYVVEYGSNMTIECKFPVEKQLDLAALQVYWMMEDKNIIQFVHGEEDLKVQHSSYRQRARLLKDQLSLGNAALQITDVKLQDAGVYTCLIAYGGADYKRITVKVNAPYNKINQRILVVDPVTSEHELTCQAEGYPKAEVIWTSSDHQVLSGKTTTTNSKREEKLFNVTSTLRINTTTNEIFYCTFRRLDPEENHTAELVIPELPLAHPPNERGGGGSGGGQDPYVKEAENLKKYFNAGHSDVVDNGTLFLGILKNWKEESDRKIMQSQIVSFYFKLFKNFKDDQSIQKSVETIKEDMNVKFFNSNKKKRDDFEKLTNYSVTDLNVQRKAIHELIQVMAELSPAAKTGKRKRSQMLFRGGGGSGGGGSGGGGSGGGGSQDPYVKEAENLKKYFNAGHSDVVDNGTLFLGILKNWKEESDRKIMQSQIVSFYFKLFKNFKDDQSIQKSVETIKEDMNVKFFNSNKKKRDDFEKLTNYSVTDLNVQRKAIHELIQVMAELSPAAKTGKRKRSQMLFRGGGGGSGGGDKTHTCPPCPAPEDEGGPSVFLFPPKPKDTLMISRTPEVTCVVVDVSHEDPEVKFNWYVDGVEVHNAKTKPREEQYNSTYRVVSVLTVLHQDWLNGKEYKCKVSNKALPAPIEKTISKAKGQPREPQVYVYPPSREEMTKNQVSLTCLVKGFYPSDIAVEWESNGQPENNYKTTPPVLDEDGSFALVSKLTVDKSRWQQGNVFSCSVMHEALHNHYTQKSLSLSPGK

SEQ ID NO: 184 - protein, 755 aa, Homo sapiens
FTVTVPKDLYVVEYGSNMTIECKFPVEKQLDLAALQVYWMMEDKNIIQFVHGEEDLKVQHSSYRQRARLLKDQLSLGNAALQITDVKLQDAGVYTCLIAYKGADYKRITVKVNAPYNKINQRILVVDPVTSEHELTCQAEGYPKAEVIWTSSDHQVLSGKTTTTNSKREEKLFNVTSTLRINTTTNEIFYCTFRRLDPEENHTAELVIPELPLAHPPNERGGGSGQDPYVKEAENLKKYFNAGHSDVVDNGTLFLGILKNWKEESDRKIMQSQIVSFYFKLFKNFKDDQSIQKSVETIKEDMNVKFFNSNKKKRDDFEKLTNYSVTDLNVQRKAIHELIQVMAELSPAAKTGKRKRSQMLFRGGGGSGGGGSGGGGSGGGGSQDPYVKEAENLKKYFNAGHSDVVDNGTLFLGILKNWKEESDRKIMQSQIVSFYFKLFKNFKDDQSIQKSVETIKEDMNVKFFNSNKKKRDDFEKLTNYSVTDLNVQRKAIHELIQVMAELSPAAKTGKRKRSQMLFRGGGGGSGGGDKTHTCPPCPAPEKKGGPSVFLFPPKPKDTLMISRTPEVTCVVVDVSHEDPEVKFNWYVDGVEVHNAKTKPREEQYNSTYRVVSVLTVLHQDWLNGKEYKCKVSNKALPAPIEKTISKAKGQPREPQVYVLPPSREEMTKNQVSLLCLVKGFYPSDIAVEWESNGQPENRYMTWPPVLDSDGSFFLYSKLTVDKSRWQQGNVFSCSVMHEALHNHYTQKSLSLSPGK

SEQ ID NO: 185 - protein, 755 aa, Homo sapiens
FTVTVPKDLYVVEYGSNMTIECKFPVEKQLDLAALQVYWMMEDKNIIQFVHGEEDLKVQHSSYRQRARLLKDQLSLGNAALQITDVKLQDAGVYTCLIAYGGADYKRITVKVNAPYNKINQRILVVDPVTSEHELTCQAEGYPKAEVIWTSSDHQVLSGKTTTTNSKREEKLFNVTSTLRINTTTNEIFYCTFRRLDPEENHTAELVIPELPLAHPPNERGGGSGQDPYVKEAENLKKYFNAGHSDVVDNGTLFLGILKNWKEESDRKIMQSQIVSFYFKLFKNFKDDQSIQKSVETIKEDMNVKFFNSNKKKRDDFEKLTNYSVTDLNVQRKAIHELIQVMAELSPAAKTGKRKRSQMLFRGGGGSGGGGSGGGGSGGGGSQDPYVKEAENLKKYFNAGHSDVVDNGTLFLGILKNWKEESDRKIMQSQIVSFYFKLFKNFKDDQSIQKSVETIKEDMNVKFFNSNKKKRDDFEKLTNYSVTDLNVQRKAIHELIQVMAELSPAAKTGKRKRSQMLFRGGGGGSGGGDKTHTCPPCPAPEKKGGPSVFLFPPKPKDTLMISRTPEVTCVVVDVSHEDPEVKFNWYVDGVEVHNAKTKPREEQYNSTYRVVSVLTVLHQDWLNGKEYKCKVSNKALPAPIEKTISKAKGQPREPQVYVLPPSREEMTKNQVSLLCLVKGFYPSDIAVEWESNGQPENRYMTWPPVLDSDGSFFLYSKLTVDKSRWQQGNVFSCSVMHEALHNHYTQKSLSLSPGK

SEQ ID NO: 186 - protein, 739 aa, Homo sapiens
LFTVTVPKELYIIEHGSNVTLECNFDTGSHVNLGAITAVLQKVENDTSPHRERATLLEEQLPLGKASFHIPQVQVRDEGQYQCIIIYGVAWDYKYLTLKVKASYRKINTHILKVPETDEVELTCQATGYPLAEVSWPNVSVPANTSHSRTPEGLYQVTSVLRLKPPPGRNFSCVFWNTHVRELTLASIDLQSQMEPRTHPTGGGGSGGGQDPYVKEAENLKKYFNAGHSDVVDNGTLFLGILKNWKEESDRKIMQSQIVSFYFKLFKNFKDDQSIQKSVETIKEDMNVKFFNSNKKKRDDFEKLTNYSVTDLNVQRKAIHELIQVMAELSPAAKTGKRKRSQMLFRGGGGSGGGGSGGGGSGGGGSQDPYVKEAENLKKYFNAGHSDVVDNGTLFLGILKNWKEESDRKIMQSQIVSFYFKLFKNFKDDQSIQKSVETIKEDMNVKFFNSNKKKRDDFEKLTNYSVTDLNVQRKAIHELIQVMAELSPAAKTGKRKRSQMLFRGGGGGSGGGDKTHTCPPCPAPEDEGGPSVFLFPPKPKDTLMISRTPEVTCVVVDVSHEDPEVKFNWYVDGVEVHNAKTKPREEQYNSTYRVVSVLTVLHQDWLNGKEYKCKVSNKALPAPIEKTISKAKGQPREPQVYVYPPSREEMTKNQVSLTCLVKGFYPSDIAVEWESNGQPENNYKTTPPVLDEDGSFALVSKLTVDKSRWQQGNVFSCSVMHEALHNHYTQKSLSLSPGK

SEQ ID NO: 187 - protein, 739 aa, Homo sapiens
LFTVTVPKELYIIEHGSNVTLECNFDTGSHVNLGAIVAVLLKVENDTSPHRERATLLEEQLPLGKASFHIPQVQVRDEGQYQCIIIYGVAWDYKYLTLKVKASYRKINTHILKVPETDEVELTCQATGYPLAEVSWPNVSVPANTSHSRTPEGLYQVTSVLRLKPPPGRNFSCVFWNTHVRELTLASIDLQSQMEPRTHPTGGGGSGGGQDPYVKEAENLKKYFNAGHSDVVDNGTLFLGILKNWKEESDRKIMQSQIVSFYFKLFKNFKDDQSIQKSVETIKEDMNVKFFNSNKKKRDDFEKLTNYSVTDLNVQRKAIHELIQVMAELSPAAKTGKRKRSQMLFRGGGGSGGGGSGGGGSGGGGSQDPYVKEAENLKKYFNAGHSDVVDNGTLFLGILKNWKEESDRKIMQSQIVSFYFKLFKNFKDDQSIQKSVETIKEDMNVKFFNSNKKKRDDFEKLTNYSVTDLNVQRKAIHELIQVMAELSPAAKTGKRKRSQMLFRGGGGGSGGGDKTHTCPPCPAPEDEGGPSVFLFPPKPKDTLMISRTPEVTCVVVDVSHEDPEVKFNWYVDGVEVHNAKTKPREEQYNSTYRVVSVLTVLHQDWLNGKEYKCKVSNKALPAPIEKTISKAKGQPREPQVYVYPPSREEMTKNQVSLTCLVKGFYPSDIAVEWESNGQPENNYKTTPPVLDEDGSFALVSKLTVDKSRWQQGNVFSCSVMHEALHNHYTQKSLSLSPGK

SEQ ID NO: 188 - protein, 736 aa, Homo sapiens
LFTVTVPKELYIIEHGSNVTLECNFDTGSHVNLGAITAVLQKVENDTSPHRERATLLEEQLPLGKASFHIPQVQVRDEGQYQCIIIYGVAWDYKYLTLKVKASYRKINTHILKVPETDEVELTCQATGYPLAEVSWPNVSVPANTSHSRTPEGLYQVTSVLRLKPPPGRNFSCVFWNTHVRELTLASIDLQSQMEPRTHPTGGGSGQDPYVKEAENLKKYFNAGHSDVVDNGTLFLGILKNWKEESDRKIMQSQIVSFYFKLFKNFKDDQSIQKSVETIKEDMNVKFFNSNKKKRDDFEKLTNYSVTDLNVQRKAIHELIQVMAELSPAAKTGKRKRSQMLFRGGGGSGGGGSGGGGSGGGGSQDPYVKEAENLKKYFNAGHSDVVDNGTLFLGILKNWKEESDRKIMQSQIVSFYFKLFKNFKDDQSIQKSVETIKEDMNVKFFNSNKKKRDDFEKLTNYSVTDLNVQRKAIHELIQVMAELSPAAKTGKRKRSQMLFRGGGGGSGGGDKTHTCPPCPAPEKKGGPSVFLFPPKPKDTLMISRTPEVTCVVVDVSHEDPEVKFNWYVDGVEVHNAKTKPREEQYNSTYRVVSVLTVLHQDWLNGKEYKCKVSNKALPAPIEKTISKAKGQPREPQVYVLPPSREEMTKNQVSLLCLVKGFYPSDIAVEWESNGQPENRYMTWPPVLDSDGSFFLYSKLTVDKSRWQQGNVFSCSVMHEALHNHYTQKSLSLSPGK

SEQ ID NO: 189 - protein, 736 aa, Homo sapiens
LFTVTVPKELYIIEHGSNVTLECNFDTGSHVNLGAIVAVLLKVENDTSPHRERATLLEEQLPLGKASFHIPQVQVRDEGQYQCIIIYGVAWDYKYLTLKVKASYRKINTHILKVPETDEVELTCQATGYPLAEVSWPNVSVPANTSHSRTPEGLYQVTSVLRLKPPPGRNFSCVFWNTHVRELTLASIDLQSQMEPRTHPTGGGSGQDPYVKEAENLKKYFNAGHSDVVDNGTLFLGILKNWKEESDRKIMQSQIVSFYFKLFKNFKDDQSIQKSVETIKEDMNVKFFNSNKKKRDDFEKLTNYSVTDLNVQRKAIHELIQVMAELSPAAKTGKRKRSQMLFRGGGGSGGGGSGGGGSGGGGSQDPYVKEAENLKKYFNAGHSDVVDNGTLFLGILKNWKEESDRKIMQSQIVSFYFKLFKNFKDDQSIQKSVETIKEDMNVKFFNSNKKKRDDFEKLTNYSVTDLNVQRKAIHELIQVMAELSPAAKTGKRKRSQMLFRGGGGGSGGGDKTHTCPPCPAPEKKGGPSVFLFPPKPKDTLMISRTPEVTCVVVDVSHEDPEVKFNWYVDGVEVHNAKTKPREEQYNSTYRVVSVLTVLHQDWLNGKEYKCKVSNKALPAPIEKTISKAKGQPREPQVYVLPPSREEMTKNQVSLLCLVKGFYPSDIAVEWESNGQPENRYMTWPPVLDSDGSFFLYSKLTVDKSRWQQGNVFSCSVMHEALHNHYTQKSLSLSPGK

SEQ ID NO: 190 - protein, 1083 aa, Homo sapiens
WPPPGTGDVVVQAPTQVPGFLGDSVTLPCYLQVPNMEVTHVSQLTWARHGESGSMAVFHQTQGPSYSESKRLEFVAARLGAELRNASLRMFGLRVEDEGNYTCLFVTFPQGSRSVDIWLRVLAKPQNTAEVQKVQLTGEPVPMARCVSTGGRPPAQITWHSDLGGMPNTSQVPGFLSGTVTVTSLWILVPSSQVDGKNVTCKVEHESFEKPQLLTVNLTVYYPPEVSISGYDNNWYLGQNEATLTCDARSNPEPTGYNWSTTMGPLPPFAVAQGAQLLIRPVDKPINTTLICNVTNALGARQAELTVQVKEGPPSEHSGISRNGGGGSGGGIWELKKDVYVVELDWYPDAPGEMVVLTCDTPEEDGITWTLDQSSEVLGSGKTLTIQVKAAGDAGQYTCHKGGEVLSHSLLLLHKKEDGIWSTDILKDQKEPKNKTFLRCEAKNYSGRFTCWWLTTISTDLTFSVKSSRGSSDPQGVTCGAATLSAERVRGDNKEYEYSVECQEDSACPAAEESLPIEVMVDAVHKLKYENYTSSFFIRDIIKPDPPKNLQLKPLKNSRQVEVSWEYPDTWSTPHSYFSLTFCVQVQGKSKREKKDRVFTDKTSATVICRKNASISVRAQDRYYSSSWSEWASVPCSGGGGSGGGSGGGGSRNLPVATPDPGMFPCLHHSQNLLRAVSNMLQKARQTLEFYPCTSEEIDHEDITKDKTSTVEACLPLELTKNESCLNSRETSFITNGSCLASRKTSFMMALCLSSIYEDLKMYQVEFKTMNAKLLMDPKRQIFLDQNMLAVIDELMQALNFNSETVPQKSSLEEPDFYKTKIKLCILLHAFRIRAVTIDRVMSYLNASGGGGSGGGDKTHTCPPCPAPEDEGGPSVFLFPPKPKDTLMISRTPEVTCVVVDVSHEDPEVKFNWYVDGVEVHNAKTKPREEQYNSTYRVVSVLTVLHQDWLNGKEYKCKVSNKALPAPIEKTISKAKGQPREPQVYVYPPSREEMTKNQVSLTCLVKGFYPSDIAVEWESNGQPENNYKTTPPVLDEDGSFALVSKLTVDKSRWQQGNVFSCSVMHEALHNHYTQKSLSLSPGK

SEQ ID NO: 191 - protein, 1083 aa, Homo sapiens
WPPPGTGDVVVQAPTQVPGFLGDSVTLPCYLQVPNMEVTHVSQLTWARHGESGSMAVFHQTQGPSYSESKRLEFVAARLGAELRNASLRMFGLRVEDEGNYTCLFVTFPQGSRSVDIWLRVLAKPQNTAEVQKVQLTGEPVPMARCVSTGGRPPAQITWHSDLGGMPNTSQVPGFLSGTVTVTSLWILVPSSQVDGKNVTCKVEHESFEKPQLLTVNLTVYYPPEVSISGYDNNWYLGQNEATLTCDARSNPEPTGYNWSTTMGPLPPFAVAQGAQLLIRPVDKPINTTLICNVTNALGARQAELTVQVKEGPPSEHSGISRNGGGGSGGGDKTHTCPPCPAPEDEGGPSVFLFPPKPKDTLMISRTPEVTCVVVDVSHEDPEVKFNWYVDGVEVHNAKTKPREEQYNSTYRVVSVLTVLHQDWLNGKEYKCKVSNKALPAPIEKTISKAKGQPREPQVYVYPPSREEMTKNQVSLTCLVKGFYPSDIAVEWESNGQPENNYKTTPPVLDEDGSFALVSKLTVDKSRWQQGNVFSCSVMHEALHNHYTQKSLSLSPGKGGGGSGGGIWELKKDVYVVELDWYPDAPGEMVVLTCDTPEEDGITWTLDQSSEVLGSGKTLTIQVKAAGDAGQYTCHKGGEVLSHSLLLLHKKEDGIWSTDILKDQKEPKNKTFLRCEAKNYSGRFTCWWLTTISTDLTFSVKSSRGSSDPQGVTCGAATLSAERVRGDNKEYEYSVECQEDSACPAAEESLPIEVMVDAVHKLKYENYTSSFFIRDIIKPDPPKNLQLKPLKNSRQVEVSWEYPDTWSTPHSYFSLTFCVQVQGKSKREKKDRVFTDKTSATVICRKNASISVRAQDRYYSSSWSEWASVPCSGGGGSGGGSGGGGSRNLPVATPDPGMFPCLHHSQNLLRAVSNMLQKARQTLEFYPCTSEEIDHEDITKDKTSTVEACLPLELTKNESCLNSRETSFITNGSCLASRKTSFMMALCLSSIYEDLKMYQVEFKTMNAKLLMDPKRQIFLDQNMLAVIDELMQALNFNSETVPQKSSLEEPDFYKTKIKLCILLHAFRIRAVTIDRVMSYLNAS

SEQ ID NO: 192 - protein, 861 aa, Homo sapiens
WPPPGTGDVVVQAPTQVPGFLGDSVTLPCYLQVPNMEVTHVSQLTWARHGESGSMAVFHQTQGPSYSESKRLEFVAARLGAELRNASLRMFGLRVEDEGNYTCLFVTFPQGSRSVDIWLRVLAKPQNTAEVQKVQLTGEPVPMARCVSTGGRPPAQITWHSDLGGMPNTSQVPGFLSGTVTVTSLWILVPSSQVDGKNVTCKVEHESFEKPQLLTVNLTVYYPPEVSISGYDNNWYLGQNEATLTCDARSNPEPTGYNWSTTMGPLPPFAVAQGAQLLIRPVDKPINTTLICNVTNALGARQAELTVQVKEGPPSEHSGISRNGGGGSGGGQDPYVKEAENLKKYFNAGHSDVVDNGTLFLGILKNWKEESDRKIMQSQIVSFYFKLFKNFKDDQSIQKSVETIKEDMNVKFFNSNKKKRDDFEKLTNYSVTDLNVQRKAIHELIQVMAELSPAAKTGKRKRSQMLFRGGGGSGGGGSGGGGSGGGGSQDPYVKEAENLKKYFNAGHSDVVDNGTLFLGILKNWKEESDRKIMQSQIVSFYFKLFKNFKDDQSIQKSVETIKEDMNVKFFNSNKKKRDDFEKLTNYSVTDLNVQRKAIHELIQVMAELSPAAKTGKRKRSQMLFRGGGGGSGGGDKTHTCPPCPAPEDEGGPSVFLFPPKPKDTLMISRTPEVTCVVVDVSHEDPEVKFNWYVDGVEVHNAKTKPREEQYNSTYRVVSVLTVLHQDWLNGKEYKCKVSNKALPAPIEKTISKAKGQPREPQVYVYPPSREEMTKNQVSLTCLVKGFYPSDIAVEWESNGQPENNYKTTPPVLDEDGSFALVSKLTVDKSRWQQGNVFSCSVMHEALHNHYTQKSLSLSPGK

SEQ ID NO: 193 - protein, 858 aa, Homo sapiens
WPPPGTGDVVVQAPTQVPGFLGDSVTLPCYLQVPNMEVTHVSQLTWARHGESGSMAVFHQTQGPSYSESKRLEFVAARLGAELRNASLRMFGLRVEDEGNYTCLFVTFPQGSRSVDIWLRVLAKPQNTAEVQKVQLTGEPVPMARCVSTGGRPPAQITWHSDLGGMPNTSQVPGFLSGTVTVTSLWILVPSSQVDGKNVTCKVEHESFEKPQLLTVNLTVYYPPEVSISGYDNNWYLGQNEATLTCDARSNPEPTGYNWSTTMGPLPPFAVAQGAQLLIRPVDKPINTTLICNVTNALGARQAELTVQVKEGPPSEHSGISRNGGGSGQDPYVKEAENLKKYFNAGHSDVVDNGTLFLGILKNWKEESDRKIMQSQIVSFYFKLFKNFKDDQSIQKSVETIKEDMNVKFFNSNKKKRDDFEKLTNYSVTDLNVQRKAIHELIQVMAELSPAAKTGKRKRSQMLFRGGGGSGGGGSGGGGSGGGGSQDPYVKEAENLKKYFNAGHSDVVDNGTLFLGILKNWKEESDRKIMQSQIVSFYFKLFKNFKDDQSIQKSVETIKEDMNVKFFNSNKKKRDDFEKLTNYSVTDLNVQRKAIHELIQVMAELSPAAKTGKRKRSQMLFRGGGGGSGGGDKTHTCPPCPAPEKKGGPSVFLFPPKPKDTLMISRTPEVTCVVVDVSHEDPEVKFNWYVDGVEVHNAKTKPREEQYNSTYRVVSVLTVLHQDWLNGKEYKCKVSNKALPAPIEKTISKAKGQPREPQVYVLPPSREEMTKNQVSLLCLVKGFYPSDIAVEWESNGQPENRYMTWPPVLDSDGSFFLYSKLTVDKSRWQQGNVFSCSVMHEALHNHYTQKSLSLSPGK

SEQ ID NO: 194 - protein, 1 aa, Artificial Sequence
  Synthetic Construct
  VARIANT 1: Can be present in repeats of any integer
G

SEQ ID NO: 195 - protein, 2 aa, Artificial Sequence
  Synthetic Construct
  VARIANT (1)..(2): Can be present in repeats of any integer
GS

SEQ ID NO: 196 - protein, 3 aa, Artificial Sequence
  Synthetic Construct
  VARIANT (1)..(3): Can be present in repeats of any integer
GGS

SEQ ID NO: 197 - protein, 4 aa, Artificial Sequence
  Synthetic Construct
  VARIANT (1)..(4): Can be present in repeats of any integer
GGGS

SEQ ID NO: 198 - protein, 7 aa, Artificial Sequence
  Synthetic Construct
  VARIANT (1)..(3): Can be present in repeats of any integer
  VARIANT (4)..(7): Can be present in repeats of any integer
GGSGGGS

SEQ ID NO: 199 - protein, 5 aa, Artificial Sequence
  Synthetic Construct
  VARIANT (1)..(5): Can be present in repeats of any integer
GSGGS

SEQ ID NO: 200 - protein, 5 aa, Artificial Sequence
  Synthetic Construct
  VARIANT (1)..(5): Can be present in repeats of any integer
GGSGS

SEQ ID NO: 201 - protein, 5 aa, Artificial Sequence
  Synthetic Construct
  VARIANT (1)..(5): Can be present in repeats of any integer
GGGGS

SEQ ID NO: 202 - protein, 2 aa, Artificial Sequence
  Synthetic Construct
GG

SEQ ID NO: 203 - protein, 3 aa, Artificial Sequence
  Synthetic Construct
GSG

SEQ ID NO: 204 - protein, 4 aa, Artificial Sequence
  Synthetic Construct
GGSG

SEQ ID NO: 205 - protein, 5 aa, Artificial Sequence
  Synthetic Construct
GGSGG

SEQ ID NO: 206 - protein, 7 aa, Artificial Sequence
  Synthetic Construct
GSGGGGG

SEQ ID NO: 207 - protein, 5 aa, Artificial Sequence
  Synthetic Construct
GSGSG

SEQ ID NO: 208 - protein, 5 aa, Artificial Sequence
  Synthetic Construct
GSGGG

SEQ ID NO: 209 - protein, 5 aa, Artificial Sequence
  Synthetic Construct
GGGSG

SEQ ID NO: 210 - protein, 5 aa, Artificial Sequence
  Synthetic Construct
GSSSG

SEQ ID NO: 211 - protein, 6 aa, Artificial Sequence
  Synthetic Construct
GGSGGS

SEQ ID NO: 212 - protein, 6 aa, Artificial Sequence
  Synthetic Construct
SGGGGS

SEQ ID NO: 213 - protein, 5 aa, Artificial Sequence
  Synthetic Construct
GGGGS

SEQ ID NO: 214 - protein, 2 aa, Artificial Sequence
  Synthetic Construct
  VARIANT (1)..(2): Can be present in repeats of any integer
GA

SEQ ID NO: 215 - protein, 12 aa, Artificial Sequence
  Synthetic Construct
GRAGGGGAGGGG

SEQ ID NO: 216 - protein, 6 aa, Artificial Sequence
  Synthetic Construct
GRAGGG

SEQ ID NO: 217 - protein, 16 aa, Artificial Sequence
  Synthetic Construct
GSGGGSGGGGSGGGGS

SEQ ID NO: 218 - protein, 14 aa, Artificial Sequence
  Synthetic Construct
GGGSGGGGSGGGGS

SEQ ID NO: 219 - protein, 10 aa, Artificial Sequence
  Synthetic Construct
GGGSGGSGGS

SEQ ID NO: 220 - protein, 15 aa, Artificial Sequence
  Synthetic Construct
GGSGGSGGSGGSGGG

SEQ ID NO: 221 - protein, 16 aa, Artificial Sequence
  Synthetic Construct
GGSGGSGGGGSGGGGS

SEQ ID NO: 222 - protein, 18 aa, Artificial Sequence
  Synthetic Construct
GGSGGSGGSGGSGGSGGS

SEQ ID NO: 223 - protein, 18 aa, Artificial Sequence
  Synthetic Construct
GGGGGGSGGGGSGGGGSA

SEQ ID NO: 224 - protein, 21 aa, Artificial Sequence
  Synthetic Construct
GSGGGSGGGGSGGGGSGGGGS

SEQ ID NO: 225 - protein, 10 aa, Artificial Sequence
  Synthetic Construct
KTGGGSGGGS

SEQ ID NO: 226 - protein, 17 aa, Artificial Sequence
  Synthetic Construct
GGPGGGGSGGGSGGGGS

SEQ ID NO: 227 - protein, 19 aa, Artificial Sequence
  Synthetic Construct
GGGSGGGGSGGGGSGGGGS

SEQ ID NO: 228 - protein, 21 aa, Artificial Sequence
  Synthetic Construct
GGGGSGGGGSGGGGSGGGGSG

SEQ ID NO: 229 - protein, 15 aa, Artificial Sequence
  Synthetic Construct
GGGGSGGGGSGGGGS

SEQ ID NO: 230 - protein, 6 aa, Artificial Sequence
  Synthetic Construct
ASTKGP

SEQ ID NO: 231 - protein, 3 aa, Artificial Sequence
  Synthetic Construct
DKP

SEQ ID NO: 232 - protein, 5 aa, Artificial Sequence
  Synthetic Construct
DKPGS

SEQ ID NO: 233 - protein, 3 aa, Artificial Sequence
  Synthetic Construct
PGS

SEQ ID NO: 234 - protein, 2 aa, Artificial Sequence
  Synthetic Construct
GS

SEQ ID NO: 235 - protein, 6 aa, Artificial Sequence
  Synthetic Construct
DKPGSG

SEQ ID NO: 236 - protein, 4 aa, Artificial Sequence
  Synthetic Construct
PGSG

SEQ ID NO: 237 - protein, 7 aa, Artificial Sequence
  Synthetic Construct
DKPGSGS

SEQ ID NO: 238 - protein, 5 aa, Artificial Sequence
  Synthetic Construct
PGSGS

SEQ ID NO: 239 - protein, 4 aa, Artificial Sequence
  Synthetic Construct
GSGS

SEQ ID NO: 240 - protein, 10 aa, Artificial Sequence
  Synthetic Construct
DKPGSGGGGG

SEQ ID NO: 241 - protein, 8 aa, Artificial Sequence
  Synthetic Construct
PGSGGGGG

SEQ ID NO: 242 - protein, 1 aa, Artificial Sequence
  Synthetic Construct
P

SEQ ID NO: 243 - protein, 13 aa, Artificial Sequence
  Synthetic Construct
GGGGSGGGSGGGG

SEQ ID NO: 244 - protein, 8 aa, Artificial Sequence
  Synthetic Construct
GGGGSGGG

SEQ ID NO: 245 - protein, 16 aa, Artificial Sequence
  Synthetic Construct
GGPGGGGSGGGSGGGG

SEQ ID NO: 246 - protein, 14 aa, Artificial Sequence
  Synthetic Construct
GGGGSGGGSGGGGS

SEQ ID NO: 247 - protein, 696 aa, Homo sapiens
WPPPGTGDVVVQAPTQVPGFLGDSVTLPCYLQVPNMEVTHVSQLTWARHGESGSMAVFHQTQGPSYSESKRLEFVAARLGAELRNASLRMFGLRVEDEGNYTCLFVTFPQGSRSVDIWLRVLAKPQNTAEVQKVQLTGEPVPMARCVSTGGRPPAQITWHSDLGGMPNTSQVPGFLSGTVTVTSLWILVPSSQVDGKNVTCKVEHESFEKPQLLTVNLTVYYPPEVSISGYDNNWYLGQNEATLTCDARSNPEPTGYNWSTTMGPLPPFAVAQGAQLLIRPVDKPINTTLICNVTNALGARQAELTVQVKEGPPSEHSGISRNGGGSGAPTSSSTKKTQLQLEHLRLDLEMILNGINNYKNPKLTDMLTFEFYMPKKATELKHLQCLERELKPLEEVLNLAQSKNFHLRPRDLISNINVIVLELKGSETTFMCEYADETATIVEFLNRWITFCQSIISTLTGGGGSGGGDKTHTCPPCPAPEKKGGPSVFLFPPKPKDTLMISRTPEVTCVVVDVSHEDPEVKFNWYVDGVEVHNAKTKPREEQYNSTYRVVSVLTVLHQDWLNGKEYKCKVSNKALPAPIEKTISKAKGQPREPQVYVLPPSREEMTKNQVSLLCLVKGFYPSDIAVEWESNGQPENRYMTWPPVLDSDGSFFLYSKLTVDKSRWQQGNVFSCSVMHEALHNHYTQKSLSLSPGK

SEQ ID NO: 248 - protein, 696 aa, Homo sapiens
WPPPGTGDVVVQAPTQVPGFLGDSVTLPCYLQVPNMEVTHVSQLTWARHGESGSMAVFHQTQGPSYSESKRLEFVAARLGAELRNASLRMFGLRVEDEGNYTCLFVTFPQGSRSVDIWLRVLAKPQNTAEVQKVQLTGEPVPMARCVSTGGRPPAQITWHSDLGGMPNTSQVPGFLSGTVTVTSLWILVPSSQVDGKNVTCKVEHESFEKPQLLTVNLTVYYPPEVSISGYDNNWYLGQNEATLTCDARSNPEPTGYNWSTTMGPLPPFAVAQGAQLLIRPVDKPINTTLICNVTNALGARQAELTVQVKEGPPSEHSGISRNGGGSGAPTSSSTKKTQLQLEHLLLDLQMILNGINNYKNPKLTDMLTFEFYMPKKATELKHLQCLERELKPLEEVLNLAQSKNFHLRPRDLISNINVIVLELKGSETTFMCEYADETATIVEFLNRWITFCTSIISTLTGGGGSGGGDKTHTCPPCPAPEKKGGPSVFLFPPKPKDTLMISRTPEVTCVVVDVSHEDPEVKFNWYVDGVEVHNAKTKPREEQYNSTYRVVSVLTVLHQDWLNGKEYKCKVSNKALPAPIEKTISKAKGQPREPQVYVLPPSREEMTKNQVSLLCLVKGFYPSDIAVEWESNGQPENRYMTWPPVLDSDGSFFLYSKLTVDKSRWQQGNVFSCSVMHEALHNHYTQKSLSLSPGK

SEQ ID NO: 249 - protein, 696 aa, Homo sapiens
WPPPGTGDVVVQAPTQVPGFLGDSVTLPCYLQVPNMEVTHVSQLTWARHGESGSMAVFHQTQGPSYSESKRLEFVAARLGAELRNASLRMFGLRVEDEGNYTCLFVTFPQGSRSVDIWLRVLAKPQNTAEVQKVQLTGEPVPMARCVSTGGRPPAQITWHSDLGGMPNTSQVPGFLSGTVTVTSLWILVPSSQVDGKNVTCKVEHESFEKPQLLTVNLTVYYPPEVSISGYDNNWYLGQNEATLTCDARSNPEPTGYNWSTTMGPLPPFAVAQGAQLLIRPVDKPINTTLICNVTNALGARQAELTVQVKEGPPSEHSGISRNGGGSGAPTSSSTKKTQLQLEHLRLDLEMILNGINNYKNPKLTDMLTFEFYMPKKATELKHLQCLERELKPLEEVLNLAQSKNFHLRPRDLISNINVIVLELKGSETTFMCEYADETATIVEFLNRWITFCTSIISTLTGGGGSGGGDKTHTCPPCPAPEKKGGPSVFLFPPKPKDTLMISRTPEVTCVVVDVSHEDPEVKFNWYVDGVEVHNAKTKPREEQYNSTYRVVSVLTVLHQDWLNGKEYKCKVSNKALPAPIEKTISKAKGQPREPQVYVLPPSREEMTKNQVSLLCLVKGFYPSDIAVEWESNGQPENRYMTWPPVLDSDGSFFLYSKLTVDKSRWQQGNVFSCSVMHEALHNHYTQKSLSLSPGK

SEQ ID NO: 250 - protein, 696 aa, Homo sapiens
WPPPGTGDVVVQAPTQVPGFLGDSVTLPCYLQVPNMEVTHVSQLTWARHGESGSMAVFHQTQGPSYSESKRLEFVAARLGAELRNASLRMFGLRVEDEGNYTCLFVTFPQGSRSVDIWLRVLAKPQNTAEVQKVQLTGEPVPMARCVSTGGRPPAQITWHSDLGGMPNTSQVPGFLSGTVTVTSLWILVPSSQVDGKNVTCKVEHESFEKPQLLTVNLTVYYPPEVSISGYDNNWYLGQNEATLTCDARSNPEPTGYNWSTTMGPLPPFAVAQGAQLLIRPVDKPINTTLICNVTNALGARQAELTVQVKEGPPSEHSGISRNGGGSGAPTSSSTKKTQLQLEHLRLDLEMILNGINNYKNPKLTDMLTFEFYMPKKATELKHLQCLERELKPLEEVLNLAQSKNFHLRPRDLISNINVIVLELKGSETTFMCEYADETATIVEFLNRWITFCTSIIRTLTGGGGSGGGDKTHTCPPCPAPEKKGGPSVFLFPPKPKDTLMISRTPEVTCVVVDVSHEDPEVKFNWYVDGVEVHNAKTKPREEQYNSTYRVVSVLTVLHQDWLNGKEYKCKVSNKALPAPIEKTISKAKGQPREPQVYVLPPSREEMTKNQVSLLCLVKGFYPSDIAVEWESNGQPENRYMTWPPVLDSDGSFFLYSKLTVDKSRWQQGNVFSCSVMHEALHNHYTQKSLSLSPGK

SEQ ID NO: 251 - protein, 295 aa, Artificial Sequence
  Synthetic Construct
QDPYVKEAENLKKYFNAGHSDVADNGTLFLGILKNWKEESDRKIMQSQIVSFYFKLFKNFKDDQSIQKSVETIKEDMNVKFFNSNKKKRDDFEKLTNYSVTDLNVQRKAIHELIQVMAELSPAAKTGKRKRSQMLFRGGGGSGGGGSGGGGSGGGGSQDPYVKEAENLKKYFNAGHSDVADNGTLFLGILKNWKEESDRKIMQSQIVSFYFKLFKNFKDDQSIQKSVETIKEDMNVKFFNSNKKKRDDFEKLTNYSVTDLNVQRKAIHELIQVMAELSPAAKTGKRKRSQMLFRG

SEQ ID NO: 252 - protein, 295 aa, Artificial Sequence
  Synthetic Construct
QDPYVKEAENLKKYFNAGHSDVVDNGTLFLGILKNWKEESDRKIMQSQIVSFYFKLFKNFKDDQSIQKSVETIKEDMNVKFFNSNKKKRDDFEKLTNYSVTDLNVQRKAIHELIQVMAELSPAAKTGKRKRSQMLFRGGGGSGGGGSGGGGSGGGGSQDPYVKEAENLKKYFNAGHSDVVDNGTLFLGILKNWKEESDRKIMQSQIVSFYFKLFKNFKDDQSIQKSVETIKEDMNVKFFNSNKKKRDDFEKLTNYSVTDLNVQRKAIHELIQVMAELSPAAKTGKRKRSQMLFRG

SEQ ID NO: 253 - protein, 517 aa, Artificial Sequence
  Synthetic Construct
IWELKKDVYVVELDWYPDAPGEMVVLTCDTPEEDGITWTLDQSSEVLGSGKTLTIQVKEFGDAGQYTCHKGGEVLSHSLLLLHKKEDGIWSTDILKDQKEPKNKTFLRCEAKNYSGRFTCWWLTTISTDLTFSVKSSRGSSDPQGVTCGAATLSAERVRGDNKEYEYSVECQEDSACPAAEESLPIEVMVDAVHKLKYENYTSSFFIRDIIKPDPPKNLQLKPLKNSRQVEVSWEYPDTWSTPHSYFSLTFCVQVQGKSKREKKDRVFTDKTSATVICRKNASISVRAQDRYYSSSWSEWASVPCSGGGGSGGGSGGGGSRNLPVATPDPGMFPCLHHSQNLLRAVSNMLQKARQTLEFYPCTSEEIDHEDITKDKTSTVEACLPLELTKNESCLNSRETSFITNGSCLASRKTSFMMALCLSSIYEDLKMYQVEFKTMNAKLLMDPKRQIFLDQNMLAVIDELMQALNFNSETVPQKSSLEEPDFYKTKIKLCILLHAFRIRAVTIDRVMSYLNAS

SEQ ID NO: 254 - protein, 517 aa, Artificial Sequence
  Synthetic Construct
IWELKKDVYVVELDWYPDAPGEMVVLTCDTPEEDGITWTLDQSSEVLGSGKTLTIQVKAAGDAGQYTCHKGGEVLSHSLLLLHKKEDGIWSTDILKDQKEPKNKTFLRCEAKNYSGRFTCWWLTTISTDLTFSVKSSRGSSDPQGVTCGAATLSAERVRGDNKEYEYSVECQEDSACPAAEESLPIEVMVDAVHKLKYENYTSSFFIRDIIKPDPPKNLQLKPLKNSRQVEVSWEYPDTWSTPHSYFSLTFCVQVQGKSKREKKDRVFTDKTSATVICRKNASISVRAQDRYYSSSWSEWASVPCSGGGGSGGGSGGGGSRNLPVATPDPGMFPCLHHSQNLLRAVSNMLQKARQTLEFYPCTSEEIDHEDITKDKTSTVEACLPLELTKNESCLNSRETSFITNGSCLASRKTSFMMALCLSSIYEDLKMYQVEFKTMNAKLLMDPKRQIFLDQNMLAVIDELMQALNFNSETVPQKSSLEEPDFYKTKIKLCILLHAFRIRAVTIDRVMSYLNAS
